(19) United States
(12) Patent Application Publication
(10) Pub. No.: US 2023/0167424 A1
(43) Pub. Date: Jun. 1, 2023

(54) COMPOSITIONS AND METHODS FOR THE TARGETING OF PCSK9

(71) Applicant: Scribe Therapeutics Inc., Alameda, CA (US)

(72) Inventors: Benjamin OAKES, El Cerrito, CA (US); Sean HIGGINS, Alameda, CA (US); Hannah SPINNER, Boston, MA (US); Sarah DENNY, San Francisco, CA (US); Brett T. STAAHL, Tiburon, CA (US); Kian TAYLOR, Atlanta, GA (US); Katherine BANEY, Berkeley, CA (US); Isabel COLIN, Oakland, CA (US); Maroof ADIL, Davis, CA (US); Cole URNES, Los Angeles, CA (US)

(21) Appl. No.: 17/791,130

(22) PCT Filed: Jan. 8, 2021
(86) PCT No.: PCT/US21/12804

§ 371 Date: Jul. 6, 2022

Related U.S. Application Data
(60) Provisional application No. 62/959,685, filed on Jan. 10, 2020.

(51) Int. Cl. C12N 9/22; C12N 15/11; C12N 15/90; A61P 3/06

(52) U.S. Cl. CPC C12N 9/22; C12N 15/11; C12N 15/111; C12N 15/907; C12Y 304/21061; A61P 3/06; C12N 2310/20; C12N 2800/80; A61K 38/00

(57) ABSTRACT

Provided herein are systems comprising Class2, Type V CRISPR polypeptides, guide nucleic acids (gNA), and optionally donor template nucleic acids useful in the modification of a PCSK9 gene. The systems are also useful for introduction into cells, for example eukaryotic cells having mutations in the PCSK9 gene. Also provided are methods of using such CasX:gNA systems to modify cells having such mutations.

### CROSS REFERENCE TO RELATED APPLICATIONS

[0001] This application claims priority to U.S. provisional patent application No. 62/959,685, filed on Jan. 10, 2020, the contents of which are incorporated herein by reference in their entirety.

### INCORPORATION BY REFERENCE OF SEQUENCE LISTING

[0002] This application contains a Sequence Listing which has been submitted in ASCII format via EFS-WEB and is hereby incorporated by reference in its entirety. Said ASCII copy, created on Jan. 6, 2021 is named SCRB_017_01WO_SeqList_ST25.txt and is 4.07 MB in size.

### BACKGROUND

[0003] In mammals, cholesterol is transported within lipoproteins via emulsification. The lipoprotein particles are classified based on their density: low-density lipoproteins (LDL), very low-density lipoproteins (VLDL), high-density lipoproteins (HDL), and chylomicrons. Surface LDL receptors are internalized during cholesterol absorption. A cell with abundant cholesterol will have its LDL receptor synthesis blocked to prevent new cholesterol in LDL particles from being taken up. Conversely, LDL receptor synthesis is promoted when a cell is deficient in cholesterol. When the process is unregulated, excess LDL particles will travel in the blood without uptake by an LDL receptor. LDL particles in the blood are oxidized and taken up by macrophages, which then become engorged and form foam cells. These foam cells can become trapped in the walls of blood vessels and contribute to atherosclerotic plaque formation, which is one of the main causes of heart attacks, strokes, and other serious medical problems.

[0004] The liver protein proprotein convertase subtilisin/kexin Type 9 (PCSK9) is a secreted, globular, auto-activating serine protease that binds to the low-density lipoprotein receptor (LDL-R) during endocytosis of LDL particles, preventing recycling of the LDL-R to the cell surface and leading to reduction of LDL-cholesterol clearance. PCSK9 binds to the LDL-R (through the EGF-A domain), preventing the conformational change of the receptor-ligand complex, which redirects the LDL-R to the lysosome instead. As the receptor for low-density lipoprotein particles (LDL) typically transports thousands of fat molecules (including cholesterol) per particle within extracellular fluid, blocking or inhibiting the function of PCSK9 to boost LDL-R-mediated clearance of LDL cholesterol can lower LDL particle concentrations. PCSK9 is expressed mainly in the liver, the intestine, the kidney, and the central nervous system, but is also highly expressed in arterial walls such as endothelium, smooth muscle cells, and macrophages, with a local effect that can regulate vascular homeostasis and atherosclerosis.

[0005] PCSK9 is a member of the proprotein convertase (PC) family and its gene is mutated in ˜2% to 3% of individuals with familial hypercholesterolemia (FH) (Sepideh Mikaeeli, S., et al. Functional analysis of natural PCSK9 mutants in modern and archaic humans. FEBS J. 2019 Aug. 6. doi: 10.1111/febs.15036). Researchers have identified several PCSK9 mutations that cause an inherited form of high cholesterol (hypercholesterolemia). These mutations change a single protein building block (amino acid) in the PCSK9 protein. Researchers describe the mutations responsible for hypercholesterolemia as “gain-of-function” because they appear to enhance the activity of the PCSK9 protein or give the protein a new, atypical function (Blesa, S., et al. A New PCSK9 Gene Promoter Variant Affects Gene Expression and Causes Autosomal Dominant Hypercholesterolemia. J. Clin. Endocrinol. & Metab. 93:3577 (2008)). The overactive PCSK9 protein substantially reduces the number of low-density lipoprotein receptors on the surface of liver cells. With fewer receptors to remove low-density lipoproteins from the blood, people with gain-of-function mutations in the PCSK9 gene have very high blood cholesterol levels. Autosomal dominant hypercholesterolemia (ADH) is a genetic disorder characterized by increased low-density lipoprotein (LDL)-cholesterol levels, leading to high risk of premature cardiovascular disease. Approximately 10 mutations in PCSK9 have been identified as a cause of the disease in different populations. All known mutations in PCSK9 causing hypercholesterolemia produce an increase in the enzymatic activity of this protease (Bleasa, S., 2008). In addition, mutations in PCSK9 can lead to autosomal dominant familial hypobetalipoproteinemia, which can lead to hepatic steatosis, cirrhosis, and other disorders.

[0006] The advent of CRISPR/Cas systems and the programmable nature of these minimal systems has facilitated their use as a versatile technology for genomic manipulation and engineering. However, current methods of generating PCSK9 protective variants and loss-of-function mutants in vivo have been ineffective due to the large number of cells that need to be modified to modulate cholesterol levels. Other concerns involve off-target effects, genome instability, or oncogenic modifications that may be caused by genome editing, as well as a lack of safe delivery modalities for gene-editing systems. Thus, there remains a need for improved compositions and methods to regulate PCSK9. Provided herein are compositions and methods for targeting PCSK9, as well as delivery vectors, to the address this need.

### SUMMARY

[0007] The present disclosure relates to modified Class 2, Type V CRISPR proteins and guide nucleic acids used in the editing of proprotein convertase subtilisin/kexin Type 9 (PCSK9) gene target nucleic acid sequences having one or more mutations. The Class 2, Type V CRISPR proteins and guide nucleic acids can be modified for passive entry into target cells. The Class 2, Type V CRISPR proteins and guide nucleic acids are useful in a variety of methods for target nucleic acid modification, which methods are also provided.

[0008] In one aspect, the present disclosure relates to Class 2 Type V CRISPR protein and guide nucleic acid systems (e.g. CasX:gNA system) and methods used to alter a target nucleic acid comprising the gene encoding the PCSK9 protein (PCSK9 gene) in cells. In some embodiments of the disclosure, the CasX:gNA system has utility in knocking-down or knocking-out a PCSK9 gene with one or more mutations, which may be a gain of function mutation, in order to reduce or eliminate expression of the mutant PCSK9 gene product and resulting elevated hypercholesterolemia in subjects having a PCSK9 disorder. In other embodiments, the CasX:gNA system has utility in correcting the sequence of a PCSK9 gene with a gain of function mutation.

[0009] In some embodiments, the Class 2 Type V:gNA system gNA is a gRNA, or a gDNA, or a chimera of RNA and DNA, and may be a single-molecule gNA or a dual-molecule gNA. In other embodiments, the system gNA has a targeting sequence comprising a sequence having at least about 50%, at least about 60%, at least about 70%, at least about 80%, at least about 85%, at least about 90%, or at least about 95%, or 100% sequence identity to a sequence of SEQ ID NOS: 247-303, 315-436, 612-2100, or 2286-13861. In some embodiments, the gNA has a targeting sequence consisting of a sequence selected from the group consisting of SEQ ID NOS: 247-303, 315-436, 612-2100, and 2286-13861. In some embodiments, the targeting sequence of the gNA is complementary to a sequence within or proximal to an exon of the PCSK9 gene. In another embodiment, the targeting sequence of the gNA is complementary to a sequence within or proximal to an intron of the PCSK9 gene. In another embodiment, the targeting sequence of the gNA is complementary to a sequence within or proximal to an intron-exon junction of the PCSK9 gene. In another embodiment, the targeting sequence of the gNA is complementary to a sequence within or proximal to a regulatory element of the PCSK9 gene. In another embodiment, the targeting sequence of the gNA is complementary to a sequence within or proximal to an intergenic region of the PCSK9 gene. The gNA can comprise a targeting sequence comprising 14 to 30 consecutive nucleotides. In other embodiments, the targeting sequence of the gNA consists of 20 nucleotides. In other embodiments, the targeting sequence consists of 19 nucleotides. In other embodiments, the targeting sequence consists of 18 nucleotides. In other embodiments, the targeting sequence consists of 17 nucleotides. In other embodiments, the targeting sequence consists of 16 nucleotides. In other embodiments, the targeting sequence consists of 15 nucleotides.

[0010] In some embodiments, the gNA has a scaffold comprising a sequence selected from the group consisting of SEQ ID NOS: 4-16 as set forth in Table 1, or a sequence having at least about 50%, at least about 60%, at least about 70%, at least about 80%, at least about 90%, at least about 95%, at least about 96%, at least about 97%, at least about 98%, or at least about 99% sequence identity thereto. In other embodiments, the CasX:gNA system gNA has a scaffold comprising a sequence selected from the group consisting of SEQ ID NOS: 2101-2286 as set forth in Table 2, or a sequence having at least about 50%, at least about 60%, at least about 70%, at least about 80%, at least about 90%, at least about 95%, at least about 96%, at least about 97%, at least about 98%, at least about 99% sequence identity thereto.

[0011] In some embodiments, the CasX:gNA systems comprise a reference CasX sequence comprising any one of SEQ ID NOS: 1-3 or a CasX variant comprising a sequence of SEQ ID NOS: 49-160, 439, 441, 443, 445, 447-460, 472, 474, 476, 478, 480, 482, 484, 486, or 488, or 490 as set forth in Tables 3, 5-7 and 9, or a sequence having at least about 50%, at least about 60%, at least about 70%, at least about 80%, or at least about 90%, or at least about 95%, or at least about 96%, or at least about 97%, or at least about 98%, or at least about 99% sequence identity thereto. In these embodiments, a CasX variant exhibits one or more improved characteristics relative to the reference CasX protein. In some embodiments, the CasX protein has binding affinity for a protospacer adjacent motif (PAM) sequence selected from the group consisting of TTC, ATC, GTC, and CTC. In some embodiments, the CasX protein has binding affinity for the PAM sequence that is at least 1.5-fold greater compared to the binding affinity of any one of the CasX proteins of SEQ ID NOS: 1-3 for the PAM sequences selected from the group consisting of TTC, ATC, GTC, and CTC.

[0012] In some embodiments of the Class 2 Type V CRISPR:gNA system of the disclosure, the CRISPR molecule and the gNA molecule are associated together in a ribonuclear protein complex (RNP). In a particular embodiment, the RNP comprising a CasX variant and the gNA variant exhibits greater editing efficiency and/or binding of a target sequence in the target DNA when any one of the PAM sequences TTC, ATC, GTC, or CTC is located 1 nucleotide 5′ to the non-target strand sequence having identity with the targeting sequence of the gNA in a cellular assay system compared to the editing efficiency and/or binding of an RNP comprising a reference CasX protein and a reference gNA in a comparable assay system.

[0013] In some embodiments, the system further comprises a donor template comprising a nucleic acid comprising at least a portion of a gene encoding a PCSK9 protein or RNA sequence, a PCSK9 regulatory region, or both the encoding and the regulatory regions, and wherein the PCSK9 encoding gene portion is selected from the group consisting of a PCSK9 exon, a PCSK9 intron, and a PCSK9 intron-exon junction, wherein the donor template is used to knock down or knock out the PCSK9 gene or is used to correct the mutation in the PCSK9 gene. In some embodiments, the system further comprises a donor template comprising a nucleic acid comprising a sequence encoding at least a portion of SEQ ID NO: 33. In other embodiments, the system further comprises a donor template comprising a nucleic acid comprising a nucleic acid sequence having one or more mutations relative to the wild-type PCSK9 gene sequence of SEQ ID NO: 33. In some cases the donor sequence is a single-stranded DNA template or a single stranded RNA template. In other cases, the donor template is a double-stranded DNA template.

[0014] In other embodiments, the disclosure provides nucleic acids encoding the systems of any of the embodiments described herein, as well as vectors comprising the nucleic acids. In some embodiments, the vector is selected from the group consisting of a retroviral vector, a lentiviral vector, an adenoviral vector, an adeno-associated viral (AAV) vector, a herpes simplex virus (HSV) vector, a plasmid, a minicircle, a nanoplasmid, and an RNA vector. In other embodiments, the vector is a virus-like particle (VLP) comprising an RNP of a CasX and gNA of any of the embodiments described herein and, optionally, a donor template nucleic acid.

[0015] In other embodiments, the disclosure provides a method of modifying a PCSK9 target nucleic acid sequence of a cell wherein the PCSK9 gene comprises one or more mutations, wherein said method comprises introducing into the cell: a) a composition comprising the Class 2 Type V:gNA system of any of the embodiments disclosed herein comprising a first gNA; b) the nucleic acid of any of the embodiments disclosed herein; c) the vector of any of the embodiments disclosed herein; d) the VLP of any of the embodiments disclosed herein; or e) a combination of two or more of the foregoing wherein the PCSK9 target nucleic acid sequence of the cells targeted by the first gNA is modified by the Class 2 Type V CRISPR protein (e.g. CasX). In some embodiments of the method, the method comprises introducing into the cells of the population a second gNA or a nucleic acid encoding the second gNA, wherein the second gNA has a targeting sequence complementary to a different or overlapping portion of the PCSK9 target nucleic acid compared to the first gNA, resulting in an additional break in the PCSK9 target nucleic acid of the cells of the population. In some embodiments of the method, the modifying comprises introducing an insertion, deletion, substitution, duplication, or inversion of one or more nucleotides in the target nucleic acid sequence as compared to the wild-type sequence. In some cases, the method further comprises contacting the target nucleic acid with a donor template nucleic acid of any of the embodiments disclosed herein. In some embodiments of the method, the donor template comprises a nucleic acid comprising at least a portion of a PCSK9 gene for correcting (by knocking in) the mutation of the PCSK9 gene, or comprises a sequence comprising a mutation or heterologous sequence for knocking out the mutant PCSK9. In those cases where the modification results in a knock-down of the PCSK9 gene, expression of the non-functional PCSK9 protein is reduced by at least about 10%, at least about 20%, at least about 30%, at least about 40%, at least about 50%, at least about 60%, at least about 70%, at least about 80%, or at least about 90% in comparison to cells that have not been modified. In other cases, wherein the modification results in a knock-out of the PCSK9 gene, the target nucleic acid of the cells of the population is modified such that at least about 10%, at least about 20%, at least about 30%, at least about 40%, at least about 50%, at least about 60%, at least about 70%, at least about 80%, or at least about 90% of the cells do not express a detectable level of non-functional PCSK9 protein. Expression of PCSK9 protein can be measured by flow cytometry, ELISA, cell-based assays, Western blot or other methods known in the art or as described in the Examples.

[0016] In some cases, the modifying of the target nucleic acid sequence in a cell occurs in vivo. In some embodiments, the cell is a eukaryotic cell selected from the group consisting of a rodent cell, a mouse cell, a rat cell, a primate cell, a non-human primate cell, and a human cell. In some embodiments, the cell is a hepatocyte, or a cell of the intestine, the kidney, the central nervous system, a smooth muscle cell, a macrophage, a retinal cell, or a cell of arterial walls such as the endothelium. In some embodiments, the cell is an eye cell. In other embodiments, the disclosure provides methods of modifying a target nucleic acid sequence wherein the target cells are contacted using vectors encoding the CasX protein and one or more gNAs, and optionally further comprising a donor template. In some cases, the vector is an Adeno-Associated Viral (AAV) vector selected from AAV1, AAV2, AAV3, AAV4, AAV5, AAV6, AAV7, AAV8, AAV9, AAV10, AAV11, AAV12, AAV44.9, AAV-Rh74, or AAVRh10. In other cases, the vector is a lentiviral vector. In other embodiments, the disclosure provides methods wherein the target cells are contacted using a vector wherein the vector is a virus-like particle comprising an RNP of a CasX and gNA of any of the embodiments described herein and, optionally, a donor template nucleic acid. In some embodiments of the method, the vector is administered to a subject at a therapeutically effective dose. The subject can be a mouse, rat, pig, non-human primate, or a human. The dose can be administered by a route of administration selected from the group consisting of intravenous, intraportal vein injection, intraperitoneal, intramuscular, subcutaneous, intraocular, and oral routes.

[0017] In other embodiments, the disclosure provides a method of treating a PCSK9 or related disorder in a subject in need thereof, comprising modifying a gene encoding PCSK9 gene in a cell of the subject, the modifying comprising contacting said cells with a therapeutically effective dose of: i) a composition comprising a CasX and gNA of any of the embodiments disclosed herein comprising a first gNA, and, optionally, a donor template; ii) a nucleic acid encoding the composition of (i); a vector selected from the group consisting of a retroviral vector, a lentiviral vector, an adenoviral vector, an adeno-associated viral (AAV) vector, a herpes simplex virus (HSV) vector, a plasmid, a minicircle, a nanoplasmid, a DNA vector, and an RNA vector, and comprising a nucleic acid of (ii); iii) a VLP comprising the composition of (i); or iv) combinations of two or more of (i)-(iii), wherein the PCSK9 gene of the cells targeted by the first gNA is modified by the CasX protein (and, optionally, the donor template) such that the mutation of the PCSK9 gene is corrected or compensated for and a functional PCSK9 protein is expressed. In other embodiments of the foregoing method of treating a PCSK9-related disease in a subject, the PCSK9 gene is knocked-down or knocked-out such that the expression of non-functional PCSK9 protein is reduced or eliminated. In some embodiments, the subject is selected from the group consisting of a rodent, a mouse, a rat, a non-human primate, and a human. In the foregoing, the vector or VLP is administered to the subject by a route of administration selected from intravenous, intraportal vein injection, intraperitoneal, intramuscular, subcutaneous, intraocular, or oral routes. In some embodiments, the PCSK9-related disorder is selected from the group consisting of autosomal dominant hypercholesterolemia (ADH), hypercholesterolemia, elevated total cholesterol levels, hyperlipidemia, elevated low-density lipoprotein (LDL) levels, elevated LDL-cholesterol levels, reduced high-density lipoprotein levels, liver steatosis, coronary heart disease, ischemia, stroke, peripheral vascular disease, thrombosis, type 2 diabetes, high elevated blood pressure, atherosclerosis, obesity, Alzheimer's disease, neurodegeneration, age-related macular degeneration (AMD) or a combination thereof.

[0018] In some cases, the method results in improvement in at least one clinically-relevant endpoint selected from the group consisting of percent change from baseline in LDL-cholesterol, decrease in plaque atheroma volume, reduction in in coronary plaque, reduction in atherosclerotic cardiovascular disease (ASCVD), cardiovascular death, nonfatal myocardial infarction, ischemic stroke, nonfatal stroke, coronary revascularization, visual acuity, and unstable angina. In other cases, the method results in improvement in at least two clinically-relevant endpoints.

[0019] In another aspect, the present disclosure provides pharmaceutical compositions and kits comprising the nucleic acids, vectors, Class 2, Type V CRISPR proteins, gNAs and gene editing pairs described herein.

[0020] In another aspect, provided herein are compositions comprising gene editing pairs, or compositions of vectors comprising or encoding gene editing pairs for use as a medicament for the treatment of a subject having a PCSK9-related disease.

[0021] In another aspect, provided herein are Class 2, Type V CRISPR:gNA systems, compositions comprising Class 2, Type V CRISPR:gNA systems, vectors comprising or encoding Class 2, Type V CRISPR:gNA systems, VLP comprising Class 2, Type V CRISPR:gNA systems, or populations of cells edited using the Class 2,Type V CRISPR:gNA systems for use as a medicament for the treatment of a PCSK9-related disease.

[0022] In another aspect, provided herein are Class 2, Type V CRISPR:gNA systems, composition comprising Class 2, Type V CRISPR:gNA systems, or vectors comprising or encoding Class 2, Type V CRISPR:gNA systems, VLP comprising Class 2,Type V CRISPR:gNA systems, populations of cells edited using the Class 2, Type V CRISPR:gNA systems, for use in a method of treatment of a PCSK9-related disease in a subject in need thereof.

[0023] In another aspect, provided herein are Class 2, Type V CRISPR:gNA systems, composition comprising Class 2, Type V CRISPR:gNA systems, or vectors comprising or encoding Class 2, Type V CRISPR:gNA systems, VLP comprising Class 2,Type V CRISPR:gNA systems, populations of cells edited using the Class 2, Type V CRISPR:gNA systems, for use in the manufacture of a medicament for the treatment of a PCSK9-related disease in a subject in need thereof.

### INCORPORATION BY REFERENCE

[0024] All publications, patents, and patent applications mentioned in this specification are herein incorporated by reference to the same extent as if each individual publication, patent, or patent application was specifically and individually indicated to be incorporated by reference. The contents of PCT/US2020/036505, filed on Jun. 5, 2020, and the contents of U.S. Provisional Patent Application No. 63/121,196, filed on Dec. 3, 2020, both which disclose CasX variants and gNA variants, are hereby incorporated by reference in their entireties.

### BRIEF DESCRIPTION OF THE DRAWINGS

[0025] The novel features of the disclosure are set forth with particularity in the appended claims. A better understanding of the features and advantages of the present disclosure will be obtained by reference to the following detailed description that sets forth illustrative embodiments, in which the principles of the disclosure are utilized, and the accompanying drawings of which:

[0026] FIG. 1 shows an SDS-PAGE gel of StX2 purification fractions visualized by colloidal Coomassie staining, as described in Example 1.

[0027] FIG. 2 shows the chromatogram from a size exclusion chromatography assay of the StX2, using of Superdex 200 16/600 pg Gel Filtration, as described in Example 1.

[0028] FIG. 3 shows an SDS-PAGE gel of StX2 purification fractions visualized by colloidal Coomassie staining, as described in Example 1.

[0029] FIG. 4 is a schematic showing the organization of the components in the pSTX34 plasmid used to assemble the CasX constructs, as described in Example 2.

[0030] FIG. 5 is a schematic showing the steps of generating the CasX 119 variant, as described in Example 2.

[0031] FIG. 6 shows an SDS-PAGE gel of purification samples, visualized on a Bio-Rad Stain-Free™ gel, as described in Example 2.

[0032] FIG. 7 shows the chromatogram of Superdex 200 16/600 pg Gel Filtration, as described in Example 2.

[0033] FIG. 8 shows an SDS-PAGE gel of gel filtration samples, stained with colloidal Coomassie, as described in Example 2.

[0034] FIG. 9 shows the results of an editing assay of 6 target genes in HEK293T cells, as described in Example 10. Each dot represents results using an individual spacer.

[0035] FIG. 10 shows the results of an editing assay of 6 target genes in HEK293T cells, with individual bars representing the results obtained with individual spacers, as described in Example 10.

[0036] FIG. 11 shows the results of an editing assay of 4 target genes in HEK293T cells, as described in Example 10. Each dot represents results using an individual spacer utilizing a CTC PAM.

[0037] FIG. 12 is a graph of the results of an assay for the quantification of active fractions of RNP formed by sgRNA174 and the CasX variants, as described in Example 12. Equimolar amounts of RNP and target were co-incubated and the amount of cleaved target was determined at the indicated timepoints. Mean and standard deviation of three independent replicates are shown for each timepoint. The biphasic fit of the combined replicates is shown. “2” refers to the reference CasX protein of SEQ ID NO:2.

[0038] FIG. 13 shows the quantification of active fractions of RNP formed by CasX2 (reference CasX protein of SEQ ID NO:2) and the modified sgRNAs, as described in Example 12. Equimolar amounts of RNP and target were co-incubated and the amount of cleaved target was determined at the indicated timepoints. Mean and standard deviation of three independent replicates are shown for each timepoint. The biphasic fit of the combined replicates is shown.

[0039] FIG. 14 shows the quantification of active fractions of RNP formed by CasX 491 and the modified sgRNAs under guide-limiting conditions, as described in Example 12. Equimolar amounts of RNP and target were co-incubated and the amount of cleaved target was determined at the indicated timepoints. The biphasic fit of the data is shown.

[0040] FIG. 15 shows the quantification of cleavage rates of RNP formed by sgRNA174 and the CasX variants, as described in Example 12. Target DNA was incubated with a 20-fold excess of the indicated RNP and the amount of cleaved target was determined at the indicated time points. Mean and standard deviation of three independent replicates are shown for each timepoint, except for 488 and 491 where a single replicate is shown. The monophasic fit of the combined replicates is shown.

[0041] FIG. 16 shows the quantification of cleavage rates of RNP formed by CasX2 and the sgRNA variants, as described in Example 12. Target DNA was incubated with a 20-fold excess of the indicated RNP and the amount of cleaved target was determined at the indicated time points. Mean and standard deviation of three independent replicates are shown for each timepoint. The monophasic fit of the combined replicates is shown.

[0042] FIG. 17 shows the quantification of initial velocities of RNP formed by CasX2 and the sgRNA variants, as described in Example 12. The first two time-points of the previous cleavage experiment were fit with a linear model to determine the initial cleavage velocity.

[0043] FIG. 18 shows the quantification of cleavage rates of RNP formed by CasX491 and the sgRNA variants, as described in Example 12. Target DNA was incubated with a 20-fold excess of the indicated RNP at 10° C. and the amount of cleaved target was determined at the indicated time points. The monophasic fit of the timepoints is shown.

[0044] FIG. 19 is a diagram and an example fluorescence activated cell sorting (FACS) plot illustrating an exemplary method for assaying the effectiveness of a reference CasX protein or single guide RNA (sgRNA), or variants thereof, as described in Example 21. A reporter (e.g., GFP reporter) coupled to a gRNA target sequence, complementary to the gRNA spacer, is integrated into a reporter cell line. Cells are transformed or transfected with a CasX protein and/or sgRNA variant, with the spacer motif of the sgRNA complementary to and targeting the gRNA target sequence of the reporter. Ability of the CasX:sgRNA ribonucleoprotein complex to cleave the target sequence is assayed by FACS. Cells that lose reporter expression indicate occurrence of CasX:sgRNA ribonucleoprotein complex-mediated cleavage and indel formation.

[0045] FIG. 20 shows results of gene editing in an EGFP disruption assay, as described in Example 23. Editing was measured by indel formation and GFP disruption in HEK293 cells carrying a GFP reporter. The Figure shows the improvement in editing efficiency of a CasX sgRNA variant of SEQ ID NO:5 versus the reference of SEQ ID NO:4 across 10 targets. When averaged across 10 targets, the editing efficiency of sgRNA SEQ ID NO:5 improved 176% compared to SEQ ID NO:4.

[0046] FIG. 21 shows results of gene editing in an EGFP disruption assay where further editing improvements were obtained in the sgRNA scaffold of SEQ ID NO:5 by swapping the extended stem loop sequence (indicated in the X-axis) for additional sequences to generate the scaffolds whose sequences are shown in Table 2, as described in Example 24.

[0047] FIG. 22 is a graph showing the fold improvement of sgRNA variants generated by DME mutations normalized to SEQ ID NO:5 as the CasX reference sgRNA, as described in Example 24. ATTATCTCATTACT is provided as SEQ ID NO: 13862.

[0048] FIG. 23 is a graph showing the fold improvement normalized to the SEQ ID NO:5 reference CasX sgRNA of variants created by both combining (stacking) scaffold stem mutations showing improved cleavage, DME mutations showing improved cleavage, and using ribozyme appendages showing improved cleavage (the appendages and their sequences are listed in Table 16 in Example 24). The resulting sgRNA variants yield 2-fold or greater improvement in cleavage compared to SEQ ID NO:5 in this assay. EGFP editing assays were performed with spacer target sequences of E6 (TGTGGTCGGGGTAGCGGCTG (SEQ ID NO: 17)) and E7 (TCAAGTCCGCCATGCCCGAA (SEQ ID NO: 18)) described in Example 23.

[0049] FIG. 24 is a graph of results of editing assayed by NGS of CasX at the PCSK9 locus in HEK293T cells showing total editing percentage, as described in Example 25.

[0050] FIG. 25 is a graph of results of editing assayed by NGS of CasX at the PCSK9 locus in Hep2G cells showing total editing percentage as described in Example 26.

[0051] FIG. 26 is a graph of results of editing assayed by NGS of CasX at the PCSK9 locus in AML12 cells showing total editing percentage as described in Example 27.

### DETAILED DESCRIPTION

[0052] While exemplary embodiments have been shown and described herein, it will be obvious to those skilled in the art that such embodiments are provided by way of example only. Numerous variations, changes, and substitutions will now occur to those skilled in the art without departing from the inventions claimed herein. It should be understood that various alternatives to the embodiments described herein may be employed in practicing the embodiments of the disclosure. It is intended that the claims define the scope of the invention and that methods and structures within the scope of these claims and their equivalents be covered thereby.

[0053] Unless otherwise defined, all technical and scientific terms used herein have the same meaning as commonly understood by one of ordinary skill in the art to which this invention belongs. Although methods and materials similar or equivalent to those described herein can be used in the practice or testing of the present embodiments, suitable methods and materials are described below. In case of conflict, the patent specification, including definitions, will control. In addition, the materials, methods, and examples are illustrative only and not intended to be limiting. Numerous variations, changes, and substitutions will now occur to those skilled in the art without departing from the invention.

### Definitions

[0054] The terms “polynucleotide” and “nucleic acid,” used interchangeably herein, refer to a polymeric form of nucleotides of any length, either ribonucleotides or deoxyribonucleotides. Thus, terms “polynucleotide” and “nucleic acid” encompass single-stranded DNA; double-stranded DNA; multi-stranded DNA; single-stranded RNA; double-stranded RNA; multi-stranded RNA; genomic DNA; cDNA; DNA-RNA hybrids; and a polymer comprising purine and pyrimidine bases or other natural, chemically or biochemically modified, non-natural, or derivatized nucleotide bases.

[0055] “Hybridizable” or “complementary” are used interchangeably to mean that a nucleic acid (e.g., RNA, DNA) comprises a sequence of nucleotides that enables it to non-covalently bind, i.e., form Watson-Crick base pairs and/or G/U base pairs, “anneal”, or “hybridize,” to another nucleic acid in a sequence-specific, antiparallel, manner (i.e., a nucleic acid specifically binds to a complementary nucleic acid) under the appropriate in vitro and/or in vivo conditions of temperature and solution ionic strength. It is understood that the sequence of a polynucleotide need not be 100% complementary to that of its target nucleic acid sequence to be specifically hybridizable; it can have at least about 70%, at least about 80%, or at least about 90%, or at least about 95% sequence identity and still hybridize to the target nucleic acid sequence. Moreover, a polynucleotide may hybridize over one or more segments such that intervening or adjacent segments are not involved in the hybridization event (e.g., a loop structure or hairpin structure, a ‘bulge’, ‘bubble’ and the like).

[0056] A “gene,” for the purposes of the present disclosure, includes a DNA region encoding a gene product (e.g., a protein, RNA), as well as all DNA regions which regulate the production of the gene product, whether or not such regulatory element sequences are adjacent to coding and/or transcribed sequences. Accordingly, a gene may include regulatory sequences including, but not necessarily limited to, promoter sequences, terminators, translational regulatory sequences such as ribosome binding sites and internal ribosome entry sites, enhancers, silencers, insulators, boundary elements, replication origins, matrix attachment sites and locus control regions. Coding sequences encode a gene product upon transcription or transcription and translation; the coding sequences of the disclosure may comprise fragments and need not contain a full-length open reading frame. A gene can include both the strand that is transcribed, e.g. the strand containing the coding sequence, as well as the complementary strand.

[0057] The term “downstream” refers to a nucleotide sequence that is located 3′ to a reference nucleotide sequence. In certain embodiments, downstream nucleotide sequences relate to sequences that follow the starting point of transcription. For example, the translation initiation codon of a gene is located downstream of the start site of transcription.

[0058] The term “upstream” refers to a nucleotide sequence that is located 5′ to a reference nucleotide sequence. In certain embodiments, upstream nucleotide sequences relate to sequences that are located on the 5′ side of a coding region or starting point of transcription. For example, most promoters are located upstream of the start site of transcription.

[0059] The term “regulatory element” is used interchangeably herein with the term “regulatory sequence,” and is intended to include promoters, enhancers, and other expression regulatory elements (e.g. transcription termination signals, such as polyadenylation signals and poly-U sequences). Exemplary regulatory elements include transcription promoters such as, but not limited to, CMV, CMV+intron A, SV40, RSV, HIV-Ltr, elongation factor 1 alpha (EF1α), MMLV-ltr, as well as other regulatory elements such as internal ribosome entry site (IRES) or P2A peptide to permit translation of multiple genes from a single transcript, metallothionein, a transcription enhancer element, a transcription termination signal, polyadenylation sequences, sequences for optimization of initiation of translation, and translation termination sequences. It will be understood that the choice of the appropriate regulatory element will depend on the encoded component to be expressed (e.g., protein or RNA) or whether the nucleic acid comprises multiple components that require different polymerases or are not intended to be expressed as a fusion protein.

[0060] The term “promoter” refers to a DNA sequence that contains an RNA polymerase binding site, transcription start site, TATA box, and/or B recognition element and assists or promotes the transcription and expression of an associated transcribable polynucleotide sequence and/or gene (or transgene). A promoter can be synthetically produced or can be derived from a known or naturally occurring promoter sequence or another promoter sequence. A promoter can be proximal or distal to the gene to be transcribed. A promoter can also include a chimeric promoter comprising a combination of two or more heterologous sequences to confer certain properties. A promoter of the present disclosure can include variants of promoter sequences that are similar in composition, but not identical to, other promoter sequence(s) known or provided herein. A promoter can be classified according to criteria relating to the pattern of expression of an associated coding or transcribable sequence or gene operably linked to the promoter, such as constitutive, developmental, tissue specific, inducible, etc.

[0061] The term “enhancer” refers to regulatory element DNA sequences that, when bound by specific proteins called transcription factors, regulate the expression of an associated gene. Enhancers may be located in the intron of the gene, or 5′ or 3′ of the coding sequence of the gene. Enhancers may be proximal to the gene (i.e., within a few tens or hundreds of base pairs (bp) of the promoter), or may be located distal to the gene (i.e., thousands of bp, hundreds of thousands of bp, or even millions of bp away from the promoter). A single gene may be regulated by more than one enhancer, all of which are envisaged as within the scope of the instant disclosure.

[0062] “Recombinant,” as used herein, means that a particular nucleic acid (DNA or RNA) is the product of various combinations of cloning, restriction, and/or ligation steps resulting in a construct having a structural coding or non-coding sequence distinguishable from endogenous nucleic acids found in natural systems. Generally, DNA sequences encoding the structural coding sequence can be assembled from cDNA fragments and short oligonucleotide linkers, or from a series of synthetic oligonucleotides, to provide a synthetic nucleic acid which is capable of being expressed from a recombinant transcriptional unit contained in a cell or in a cell-free transcription and translation system. Such sequences can be provided in the form of an open reading frame uninterrupted by internal non-translated sequences, or introns, which are typically present in eukaryotic genes. Genomic DNA comprising the relevant sequences can also be used in the formation of a recombinant gene or transcriptional unit. Sequences of non-translated DNA may be present 5′ or 3′ from the open reading frame, where such sequences do not interfere with manipulation or expression of the coding regions, and may indeed act to modulate production of a desired product by various mechanisms (see “enhancers” and “promoters”, above).

[0063] The term “recombinant polynucleotide” or “recombinant nucleic acid” refers to one which is not naturally occurring, e.g., is made by the artificial combination of two otherwise separated segments of sequence through human intervention. This artificial combination is often accomplished by either chemical synthesis means, or by the artificial manipulation of isolated segments of nucleic acids, e.g., by genetic engineering techniques. Such can be done to replace a codon with a redundant codon encoding the same or a conservative amino acid, while typically introducing or removing a sequence recognition site. Alternatively, it is performed to join together nucleic acid segments of desired functions to generate a desired combination of functions. This artificial combination is often accomplished by either chemical synthesis means, or by the artificial manipulation of isolated segments of nucleic acids, e.g., by genetic engineering techniques.

[0064] Similarly, the term “recombinant polypeptide” or “recombinant protein” refers to a polypeptide or protein which is not naturally occurring, e.g., is made by the artificial combination of two otherwise separated segments of amino sequence through human intervention. Thus, e.g., a protein that comprises a heterologous amino acid sequence is recombinant.

[0065] As used herein, the term “contacting” means establishing a physical connection between two or more entities. For example, contacting a target nucleic acid sequence with a guide nucleic acid means that the target nucleic acid sequence and the guide nucleic acid are made to share a physical connection; e.g., can hybridize if the sequences share sequence similarity.

[0066] “Dissociation constant”, or “K_{d}”, are used interchangeably and mean the affinity between a ligand “L” and a protein “P”; i.e., how tightly a ligand binds to a particular protein. It can be calculated using the formula K_{d}=[L] [P]/[LP], where [P], [L] and [LP] represent molar concentrations of the protein, ligand and complex, respectively.

[0067] The disclosure provides compositions and methods useful for modifying a target nucleic acid sequence. As used herein “modifying” includes, but is not limited to, cleaving, nicking, editing, deleting, knocking in, knocking out, and the like.

[0068] The term “knock-out” refers to the elimination of a gene or the expression of a gene. For example, a gene can be knocked out by either a deletion or an addition of a nucleotide sequence that leads to a disruption of the reading frame. As another example, a gene may be knocked out by replacing a part of the gene with an irrelevant sequence. The term “knock-down” as used herein refers to reduction in the expression of a gene or its gene product(s). As a result of a gene knock-down, the protein activity or function may be attenuated or the protein levels may be reduced or eliminated.

[0069] As used herein, “homology-directed repair” (HDR) refers to the form of DNA repair that takes place during repair of double-strand breaks in cells. This process requires nucleotide sequence homology, and uses a donor template to repair or knock-out a target DNA, and leads to the transfer of genetic information from the donor (e.g., such as the donor template) to the target. Homology-directed repair can result in an alteration of the sequence of the target nucleic acid sequence by insertion, deletion, or mutation if the donor template differs from the target DNA sequence and part or all of the sequence of the donor template is incorporated into the target DNA at the correct genomic locus.

[0070] As used herein, “non-homologous end joining” (NHEJ) refers to the repair of double-strand breaks in DNA by direct ligation of the break ends to one another without the need for a homologous template (in contrast to homology-directed repair, which requires a homologous sequence to guide repair). NHEJ often results in indels; the loss (deletion) or insertion of nucleotide sequence near the site of the double-strand break.

[0071] As used herein “micro-homology mediated end joining” (MMEJ) refers to a mutagenic DSB repair mechanism, which always associates with deletions flanking the break sites without the need for a homologous template (in contrast to homology-directed repair, which requires a homologous sequence to guide repair). MMEJ often results in the loss (deletion) of nucleotide sequence near the site of the double-strand break.

[0072] A polynucleotide or polypeptide (or protein) has a certain percent “sequence similarity” or “sequence identity” to another polynucleotide or polypeptide, meaning that, when aligned, that percentage of bases or amino acids are the same, and in the same relative position, when comparing the two sequences. Sequence similarity (interchangeably referred to as percent similarity, percent identity, or homology) can be determined in a number of different manners. To determine sequence similarity, sequences can be aligned using the methods and computer programs that are known in the art, including BLAST, available over the world wide web at ncbi.nlm.nih.gov/BLAST. Percent complementarity between particular stretches of nucleic acid sequences within nucleic acids can be determined using any convenient method. Example methods include BLAST programs (basic local alignment search tools) and PowerBLAST programs (Altschul et al., J. Mol. Biol., 1990, 215, 403-410; Zhang and Madden, Genome Res., 1997, 7, 649-656) or by using the Gap program (Wisconsin Sequence Analysis Package, Version 8 for Unix, Genetics Computer Group, University Research Park, Madison Wis.), e.g., using default settings, which uses the algorithm of Smith and Waterman (Adv. Appl. Math., 1981, 2, 482-489).

[0073] The terms “polypeptide,” and “protein” are used interchangeably herein, and refer to a polymeric form of amino acids of any length, which can include coded and non-coded amino acids, chemically or biochemically modified or derivatized amino acids, and polypeptides having modified peptide backbones. The term includes fusion proteins, including, but not limited to, fusion proteins with a heterologous amino acid sequence.

[0074] A “vector” or “expression vector” is a replicon, such as plasmid, phage, virus, or cosmid, to which another DNA segment, i.e., an “insert”, may be attached so as to bring about the replication or expression of the attached segment in a cell.

[0075] The term “naturally-occurring” or “unmodified” or “wild type” as used herein as applied to a nucleic acid, a polypeptide, a cell, or an organism, refers to a nucleic acid, polypeptide, cell, or organism that is found in nature.

[0076] As used herein, a “mutation” refers to an insertion, deletion, substitution, duplication, or inversion of one or more amino acids or nucleotides as compared to a wild-type or reference amino acid sequence or to a wild-type or reference nucleotide sequence.

[0077] As used herein the term “isolated” is meant to describe a polynucleotide, a polypeptide, or a cell that is in an environment different from that in which the polynucleotide, the polypeptide, or the cell naturally occurs. An isolated genetically modified host cell may be present in a mixed population of genetically modified host cells.

[0078] A “host cell,” as used herein, denotes a eukaryotic cell, a prokaryotic cell, or a cell from a multicellular organism (e.g., a cell line) cultured as a unicellular entity, which eukaryotic or prokaryotic cells are used as recipients for a nucleic acid (e.g., an expression vector), and include the progeny of the original cell which has been genetically modified by the nucleic acid. It is understood that the progeny of a single cell may not necessarily be completely identical in morphology or in genomic or total DNA complement as the original parent, due to natural, accidental, or deliberate mutation. A “recombinant host cell” (also referred to as a “genetically modified host cell”) is a host cell into which has been introduced a heterologous nucleic acid, e.g., an expression vector.

[0079] The term “conservative amino acid substitution” refers to the interchangeability in proteins of amino acid residues having similar side chains. For example, a group of amino acids having aliphatic side chains consists of glycine, alanine, valine, leucine, and isoleucine; a group of amino acids having aliphatic-hydroxyl side chains consists of serine and threonine; a group of amino acids having amide-containing side chains consists of asparagine and glutamine; a group of amino acids having aromatic side chains consists of phenylalanine, tyrosine, and tryptophan; a group of amino acids having basic side chains consists of lysine, arginine, and histidine; and a group of amino acids having sulfur-containing side chains consists of cysteine and methionine. Exemplary conservative amino acid substitution groups are: valine-leucine-isoleucine, phenylalanine-tyrosine, lysine-arginine, alanine-valine, and asparagine-glutamine.

[0080] The term “low-density lipoprotein (LDL)” refers to one of the five major groups of lipoprotein, from least dense (lower weight-volume ratio particles) to most dense (larger weight-volume ratio particles): chylomicrons, very low-density lipoproteins (VLDL), low-density lipoproteins (LDL), intermediate-density lipoproteins (IDL), and high-density lipoproteins (HDL). Lipoproteins transfer lipids (fats) around the body in the extracellular fluid thereby facilitating the transfer of fats to the cells body via receptor-mediated endocytosis. An LDL particle is about 220-275 angstroms in diameter.

[0081] “Low-density lipoprotein (LDL) receptor” refers to a receptor protein of 839 amino acids (after removal of 21-amino acid signal peptide) that mediates the endocytosis of cholesterol-rich LDL particles. It is a cell-surface receptor that recognizes the apoprotein B100 and apoE protein found in chylomicron remnants and VLDL remnants (IDL) resulting in the binding and endocytosis of LDL-cholesterol. This process occurs in all nucleated cells, but mainly in the liver which removes approximately 70% of LDL from the circulation. The human LDLR gene is described in part in the NCBI database (ncbi.nlm.nih.gov) as Reference Sequence NG_009060.1, which is incorporated by reference herein.

[0082] As used herein, “treatment” or “treating,” are used interchangeably herein and refer to an approach for obtaining beneficial or desired results, including but not limited to a therapeutic benefit and/or a prophylactic benefit. By therapeutic benefit is meant eradication or amelioration of the underlying disorder or disease being treated. A therapeutic benefit can also be achieved with the eradication or amelioration of one or more of the symptoms or an improvement in one or more clinical parameters associated with the underlying disease such that an improvement is observed in the subject, notwithstanding that the subject may still be afflicted with the underlying disorder.

[0083] The terms “therapeutically effective amount” and “therapeutically effective dose”, as used herein, refer to an amount of a drug or a biologic, alone or as a part of a composition, that is capable of having any detectable, beneficial effect on any symptom, aspect, measured parameter or characteristics of a disease state or condition when administered in one or repeated doses to a subject such as a human or an experimental animal. Such effect need not be absolute to be beneficial.

[0084] As used herein, “administering” is meant as a method of giving a dosage of a compound (e.g., a composition of the disclosure) or a composition (e.g., a pharmaceutical composition) to a subject.

[0085] A “subject” is a mammal. Mammals include, but are not limited to, domesticated animals, non-human primates, humans, rabbits, mice, rats and other rodents.

### I. General Methods

[0086] The practice of the present invention employs, unless otherwise indicated, conventional techniques of immunology, biochemistry, chemistry, molecular biology, microbiology, cell biology, genomics and recombinant DNA, which can be found in such standard textbooks as Molecular Cloning: A Laboratory Manual, 3rd Ed. (Sambrook et al., Harbor Laboratory Press 2001); Short Protocols in Molecular Biology, 4^{th} Ed. (Ausubel et al. eds., John Wiley & Sons 1999); Protein Methods (Bollag et al., John Wiley & Sons 1996); Nonviral Vectors for Gene Therapy (Wagner et al. eds., Academic Press 1999); Viral Vectors (Kaplift & Loewy eds., Academic Press 1995); Immunology Methods Manual (I. Lefkovits ed., Academic Press 1997); and Cell and Tissue Culture: Laboratory Procedures in Biotechnology (Doyle & Griffiths, John Wiley & Sons 1998), the disclosures of which are incorporated herein by reference.

[0087] Where a range of values is provided, it is understood that endpoints are included and that each intervening value, to the tenth of the unit of the lower limit unless the context clearly dictates otherwise, between the upper and lower limit of that range and any other stated or intervening value in that stated range, is encompassed. The upper and lower limits of these smaller ranges may independently be included in the smaller ranges, and are also encompassed, subject to any specifically excluded limit in the stated range. Where the stated range includes one or both of the limits, ranges excluding either or both of those included limits are also included.

[0088] Unless defined otherwise, all technical and scientific terms used herein have the same meaning as commonly understood by one of ordinary skill in the art to which this invention belongs. All publications mentioned herein are incorporated herein by reference to disclose and describe the methods and/or materials in connection with which the publications are cited.

[0089] It must be noted that as used herein and in the appended claims, the singular forms “a,” “an,” and “the” include plural referents unless the context clearly dictates otherwise.

[0090] It will be appreciated that certain features of the disclosure, which are, for clarity, described in the context of separate embodiments, may also be provided in combination in a single embodiment. In other cases, various features of the disclosure, which are, for brevity, described in the context of a single embodiment, may also be provided separately or in any suitable sub-combination. It is intended that all combinations of the embodiments pertaining to the disclosure are specifically embraced by the present disclosure and are disclosed herein just as if each and every combination was individually and explicitly disclosed. In addition, all sub-combinations of the various embodiments and elements thereof are also specifically embraced by the present disclosure and are disclosed herein just as if each and every such sub-combination was individually and explicitly disclosed herein.

### II. Systems for Genetic Editing of PCSK9 Genes

[0091] In a first aspect, the present disclosure provides systems comprising a CRISPR nuclease protein and one or more guide nucleic acids (gNA), as well as nucleic acids encoding the CRISPR nuclease proteins and gNA, for use in modifying or editing a PCSK9 gene (referred to herein as the “target nucleic acid”) in order to modify expression of the PCSK9 gene product.

[0092] As used herein, a “system,” such as the systems comprising a CRISPR nuclease protein and one or more gNAs the disclosure, as well as nucleic acids encoding the CRISPR nuclease proteins and gNA, is used interchangeably with term “composition.”

[0093] The PCSK9 gene encodes proprotein convertase subtilisin/kexin Type 9 (“PCSK9”), a protein that binds to the receptor for low-density lipoprotein particles (LDL) for transport of LDL into the cell. The PCSK9 gene encompasses the sequence that spans chr1:55,039,476-55,064,853 of the human genome (GRCh38/hg38) (the notation refers to the chromosome 1 (chr1), starting at the 55,039,476 bp to 55,064,853 bp on chromosome 1 (Homo sapiens Updated Annotation Release 109.20190905, GRCh38.p13) (NCBI). The human PCSK9 gene is described in part in the NCBI database (ncbi.nlm.nih.gov) as Reference Sequence NG_009061.1, which is incorporated by reference herein. The PCSK9 locus has 12 exons that produces an mRNA of 3636 bp encoding a 692-amino acid protein that, following its synthesis, undergoes an autocatalytic cleavage reaction that clips off the prodomain, resulting in an activated protein having 540 amino acids. The prodomain remains attached to the catalytic and resistin-like domains, likely because the prodomain serves as a chaperone and facilitates folding and secretion (Seidah, N G et al., Proc Natl Acad Sci USA 100(3):928 (2003)). The secretory proprotein convertase neural apoptosis-regulated convertase 1 (NARC-1): liver regeneration and neuronal differentiation (Seidah N G, et al.). This protein, also called neural apoptosis regulated convertase, is a serine protease belonging to the protease K subfamily of subtilases.

[0094] The human PCSK9 gene (HGNC:20001) encodes a protein (Q8NBP7) having the sequence

(SEQ ID NO: 33)
MGTVSSRRSWWPLPLLLLLLLLLGPAGARAQEDEDGDYEELVLALRSEE
DGLAEAPEHGTTATFHRCAKDPWRLPGTYVVVLKEETHLSQSERTARRL
QAQAARRGYLTKILHVFHGLLPGFLVKMSGDLLELALKLPHVDYIEEDS
SVFAQSIPWNLERITPPRYRADEYQPPDGGSLVEVYLLDTSIQSDHREI
EGRVMVTDFENVPEEDGTRFHRQASKCDSHGTHLAGVVSGRDAGVAKGA
SMRSLRVLNCQGKGTVSGTLIGLEFIRKSQLVQPVGPLVVLLPLAGGYS
RVLNAACQRLARAGVVLVTAAGNFRDDACLYSPASAPEVITVGATNAQD
QPVTLGTLGTNFGRCVDLFAPGEDIIGASSDCSTCFVSQSGTSQAAAHV
AGIAAMMLSAEPELTLAELRQRLIHFSAKDVINEAWFPEDQRVLTPNLV
AALPPSTHGAGWQLFCRTVWSAHSGPTRMATAVARCAPDEELLSCSSFS
RSGKRRGERMEAQGGKLVCRAHNAFGGEGVYAIARCCLLPQANCSVHTA
PPAEASMGTRVHCHQQGHVLTGCSSHWEVEDLGTHKPPVLRPRGQPNQC
VGHREASIHASCCHAPGLECKVKEHGIPAPQEQVTVACEEGWTLTGCSA
LPGTSHVLGAYAVDNTCVVRSRDVSTTGSTSEGAVTAVAICCRSRHLAQ
ASQELQ.

[0095] In some embodiments, the disclosure provides systems specifically designed to modify the PCSK9 gene in eukaryotic cells having a gain of function mutation. In some cases, the CRISPR systems are designed to knock-down or knock-out the PCSK9 gene. In other cases, the CRISPR systems are designed to correct one or more mutations in the PCSK9 gene. Generally, any portion of the PCSK9 gene can be targeted using the programmable compositions and methods provided herein, described more fully, herein.

[0096] In some embodiments, the CRISPR nuclease is a Class 2, Type V nuclease. In some embodiments, the Class 2, Type V nuclease is selected from the group consisting of Cas12a, Cas12b, Cas12c, Cas12d (CasY), Cas12J, CasZ, and CasX. In some embodiments, the disclosure provides systems comprising one or more CasX proteins and one or more guide nucleic acids (gNA) as a CasX:gNA system.

[0097] In some embodiments, the CasX:gNA systems of the disclosure comprise one or more CasX proteins, one or more guide nucleic acids (gNA) and one or more donor template nucleic acids comprising a nucleic acid encoding a portion of a PCSK9 gene wherein the nucleic acid comprises a wild-type sequence, a cDNA sequence encoding a portion of a functional PCSK9 protein, a deletion, an insertion, or a mutation of one or more nucleotides in comparison to a genomic nucleic acid sequence encoding the mutant PCSK9. In some embodiments, the donor template comprises one or more mutations compared to a wild-type PCSK9 gene utilized for insertion for either knocking out or knocking down (described more fully, below) the target nucleic acid sequence with one or more mutations. In other cases, the CasX:gNA systems can optionally further comprise a donor template for the introduction (or knocking in) of all or a portion of gene encoding a sequence for the production of a wild-type PCSK9 protein (SEQ ID NO: 33) in the target cell.

[0098] In those cases where the PCSK9 mutation spans multiple exons, the disclosure contemplates a donor template of sufficient length that may also be optimized to contain synthetic intron sequences of shortened length (relative to the genomic intron) between the exons in the donor template to ensure proper expression and processing of the PCSK9 locus. In some embodiments, the donor polynucleotide comprises at least about 10, at least about 50, at least about 100, or at least about 200, or at least about 300, or at least about 400, or at least about 500, or at least about 600, or at least about 700, or at least about 800, or at least about 900, or at least about 1000, or at least about 10,000, or at least about 15,000, or at least about 30,000 nucleotides. In other embodiments, the donor polynucleotide comprises at least about 10 to about 30,000 nucleotides, or at least about 100 to about 15,000 nucleotides, or at least about 400 to about 10,000 nucleotides, or at least about 600 to about 5000 nucleotides, or at least about 1000 to about 2000 nucleotides, wherein the PCSK9 gene portion is selected from the group consisting of a PCSK9 exon, a PCSK9 intron, a PCSK9 intron-exon junction, a PCSK9 regulatory region, a PCSK9 coding region, a PCSK9 non-coding region, a combination of any of the preceding portions of the PCSK9 gene, or the entirety of the PCSK9 gene. In some embodiments, the PCSK9 gene portion comprises a combination of any of a PCSK9 exon sequence, a PCSK9 intron sequence, a PCSK9 intron-exon junction sequence, or a PCSK9 regulatory region sequence. In some embodiments, the donor template is a single stranded DNA template or a single stranded RNA template. In other embodiments, the donor template is a double stranded DNA template.

[0099] In some embodiments, the disclosure provides gene editing pairs of a CasX and a gNA of any of the embodiments described herein that are capable of being bound together prior to their use for gene editing and, thus, are “pre-complexed” as a ribonuclear protein complex (RNP). The use of a pre-complexed RNP confers advantages in the delivery of the system components to a cell or target nucleic acid sequence for editing of the target nucleic acid sequence. In some embodiments, the functional RNP can be delivered ex vivo to a cell by electrophoresis or by chemical means. In other embodiments, the functional RNP can be delivered either ex vivo or in vivo by a vector in their functional form. The gNA can provide target specificity to the complex by including a targeting sequence (or “spacer”) having a nucleotide sequence that is complementary to a sequence of the target nucleic acid sequence while the CasX protein of the pre-complexed CasX:gNA provides the site-specific activity such as cleavage or nicking of the target sequence that is guided to a target site (e.g., stabilized at a target site within the PCSK9 gene) within a target nucleic acid sequence by virtue of its association with the gNA. The CasX proteins and gNA components of the CasX:gNA systems and their sequences, features and functions and their use in the editing of the PCSK9 gene are described more fully, below.

### III. Guide Nucleic Acids of the Systems for Genetic Editing

[0100] In another aspect, the disclosure relates to guide nucleic acids (gNA) comprising a targeting sequence complementary to a target nucleic acid sequence of a PCSK9 gene, wherein the gNA is capable of forming a complex with a CRISPR protein that has specificity to a protospacer adjacent motif (PAM) sequence comprising a TC motif in the complementary non-target strand, and wherein the PAM sequence is located 1 nucleotide 5′ of the sequence in the non-target strand that is complementary to the target nucleic acid sequence in the target strand of the target nucleic acid. In some embodiments, the gNA is capable of forming a complex with a Class 2, Type V CRISPR nuclease. In a particular embodiment, the gNA is capable of forming a complex with a CasX nuclease.

[0101] In some embodiments, the disclosure relates to guide nucleic acids (gNA) utilized in the CasX:gNA systems that have utility in genome editing of a PCSK9 gene in a cell. The present disclosure provides specifically-designed guide nucleic acids (“gNAs”) with targeting sequences that are complementary to (and are therefore able to hybridize with) the PCSK9 gene as a component of the gene editing CasX:gNA systems. Representative, but non-limiting examples of targeting sequences to the PCSK9 target nucleic acid that can be utilized in the gNA of the embodiments are presented as SEQ ID NOS: 247-303, 315-436, 612-2100, and 2286-13861. In some embodiments, the gNA is a deoxyribonucleic acid molecule (“gDNA”); in some embodiments, the gNA is a ribonucleic acid molecule (“gRNA”); and in other embodiments, the gNA is a chimera, and comprises both DNA and RNA. As used herein, the terms gNA, gRNA, and gDNA cover naturally-occurring molecules, as well as sequence variants.

[0102] It is envisioned that in some embodiments, multiple gNAs (e.g., two or more) are delivered in the methods for the modification of a target nucleic acid sequence by use of the CasX:gNA systems which is then edited by host cell repair mechanisms such as non-homologous end joining (NHEJ), homology-directed repair (HDR, which can include, for example, insertion of a donor template to replace all or a portion of the PCSK9 exon), homology-independent targeted integration (HITI), micro-homology mediated end joining (MMEJ), single strand annealing (SSA) or base excision repair (BER). For example, when an editing event designed to delete one or more mutant exons of the PCSK9 gene is desired, a pair of gNAs can be used in order to bind and cleave at two different sites 5′ and 3′ of the exon(s) bearing the mutation(s) within the PCSK9 gene. In the context of nucleic acids, cleavage refers to the breakage of the covalent backbone of a nucleic acid molecule; either DNA or RNA, by the nuclease. Both single-stranded cleavage and double-stranded cleavage are possible, and double-stranded cleavage can occur as a result of two distinct single-stranded cleavage events. In some embodiments, small indels introduced by the CasX:gNA systems of the embodiments described herein and cellular repair systems can restore the protein reading frame of the mutant PCSK9 gene (“reframing” strategy). When the reframing strategy is used, the cells may be contacted with a single gNA. Reference gNA and gNA variants.

[0103] In some embodiments, a gNA of the present disclosure comprises a sequence of a naturally-occurring gNA (a “reference gNA”). In other cases, a reference gNA of the disclosure may be subjected to one or more mutagenesis methods, such as the mutagenesis methods described herein, which may include Deep Mutational Evolution (DME), deep mutational scanning (DMS), error prone PCR, cassette mutagenesis, random mutagenesis, staggered extension PCR, gene shuffling, or domain swapping, in order to generate one or more gNA variants with a modified sequence relative to the reference gNA, wherein the gNA variant exhibits enhanced or varied properties relative to the reference gNA. gNA variants also include variants comprising one or more exogenous sequences, for example fused to either the 5′ or 3′ end, or inserted internally. The activity of reference gNAs may be used as a benchmark against which the activity of gNA variants are compared, thereby measuring improvements in function or other characteristics of the gNA variants. In other embodiments, a reference gNA may be subjected to one or more deliberate, specifically-targeted mutations in order to produce a gNA variant, for example a rationally designed variant.

[0104] The gNAs of the disclosure comprise two segments: a targeting sequence and a protein-binding segment. The targeting segment of a gNA includes a nucleotide sequence (referred to interchangeably as a guide sequence, a spacer, a targeter, or a targeting sequence) that is complementary to (and therefore hybridizes with) a specific sequence (a target site) within the target nucleic acid sequence (e.g., a target ssRNA, a target ssDNA, a strand of a double stranded target DNA, etc.), described more fully below. The targeting sequence of a gNA is capable of binding to a target nucleic acid sequence, including a coding sequence, a complement of a coding sequence, a non-coding sequence, and to regulatory elements. The protein-binding segment (or “activator” or “protein-binding sequence”) interacts with (e.g., binds to) a CasX protein as a complex, forming an RNP (described more fully, below). The protein-binding segment is alternatively referred to herein as a “scaffold”, which is comprised of several regions, described more fully, below.

[0105] In the case of a dual guide RNA (dgRNA), the targeter and the activator portions each have a duplex-forming segment, where the duplex forming segment of the targeter and the duplex-forming segment of the activator have complementarity with one another and hybridize to one another to form a double stranded duplex (dsRNA duplex for a gRNA). When the gNA is a gRNA, the term “targeter” or “targeter RNA” is used herein to refer to a crRNA-like molecule (crRNA: “CRISPR RNA”) of a CasX dual guide RNA (and therefore of a CasX single guide RNA when the “activator” and the “targeter” are linked together, e.g., by intervening nucleotides). The crRNA has a 5′ region that anneals with the tracrRNA followed by the nucleotides of the targeting sequence. Thus, for example, a guide RNA (dgRNA or sgRNA) comprises a guide sequence and a duplex-forming segment of a crRNA, which can also be referred to as a crRNA repeat. A corresponding tracrRNA-like molecule (activator) also comprises a duplex-forming stretch of nucleotides that forms the other half of the dsRNA duplex of the protein-binding segment of the guide RNA. Thus, a targeter and an activator, as a corresponding pair, hybridize to form a dual guide NA, referred to herein as a “dual guide NA”, a “dual-molecule gNA”, a “dgNA”, a “double-molecule guide NA”, or a “two-molecule guide NA”. Site-specific binding and/or cleavage of a target nucleic acid sequence (e.g., genomic DNA) by the CasX protein can occur at one or more locations (e.g., a sequence of a target nucleic acid) determined by base-pairing complementarity between the targeting sequence of the gNA and the target nucleic acid sequence. Thus, for example, the gNA of the disclosure have sequences complementarity to and therefore can hybridize with the target nucleic acid that is adjacent to a sequence complementary to a TC PAM motif or a PAM sequence, such as ATC, CTC, GTC, or TTC. Because the targeting sequence of a guide sequence hybridizes with a sequence of a target nucleic acid sequence, a targeter can be modified by a user to hybridize with a specific target nucleic acid sequence, so long as the location of the PAM sequence is considered. Thus, in some cases, the sequence of a targeter may be a non-naturally occurring sequence. In other cases, the sequence of a targeter may be a naturally-occurring sequence, derived from the gene to be edited. In other embodiments, the activator and targeter of the gNA are covalently linked to one another (rather than hybridizing to one another) and comprise a single molecule, referred to herein as a “single-molecule gNA,” “one-molecule guide NA,” “single guide NA”, “single guide RNA”, a “single-molecule guide RNA,” a “one-molecule guide RNA”, a “single guide DNA”, a “single-molecule DNA”, or a “one-molecule guide DNA”, (“sgNA”, “sgRNA”, or a “sgDNA”). In some embodiments, the sgNA includes an “activator” or a “targeter” and thus can be an “activator-RNA” and a “targeter-RNA,” respectively.

[0106] Collectively, the assembled gNAs of the disclosure comprise four distinct regions, or domains: the RNA triplex, the scaffold stem, the extended stem, and the targeting sequence that, in the embodiments of the disclosure, is specific for a target nucleic acid and is located on the 3′ end of the gNA. The RNA triplex, the scaffold stem, and the extended stem, together, are referred to as the “scaffold” of the gNA,

[0107] a. RNA Triplex

[0108] In some embodiments of the guide RNAs provided herein (including reference sgRNAs), there is a RNA triplex, and the RNA triplex comprises the sequence of a UUU-nX(˜4-15)-UUU stem loop (SEQ ID NO: 19) that ends with an AAAG after 2 intervening stem loops (the scaffold stem loop and the extended stem loop), forming a pseudoknot that may also extend past the triplex into a duplex pseudoknot. The UU-UUU-AAA sequence of the triplex forms as a nexus between the targeting sequence, scaffold stem, and extended stem. In exemplary CasX sgRNAs, the UUU-loop-UUU region is coded for first, then the scaffold stem loop, and then the extended stem loop, which is linked by the tetraloop, and then an AAAG closes off the triplex before becoming the targeting sequence.

[0109] b. Scaffold Stem Loop

[0110] In some embodiments of sgNAs of the disclosure, the triplex region is followed by the scaffold stem loop. The scaffold stem loop is a region of the gNA that is bound by CasX protein (such as a CasX variant protein). In some embodiments, the scaffold stem loop is a fairly short and stable stem loop. In some cases, the scaffold stem loop does not tolerate many changes, and requires some form of an RNA bubble. In some embodiments, the scaffold stem is necessary for CasX sgNA function. While it is perhaps analogous to the nexus stem of Cas9 as being a critical stem loop, the scaffold stem of a CasX sgNA, in some embodiments, has a necessary bulge (RNA bubble) that is different from many other stem loops found in CRISPR/Cas systems. In some embodiments, the presence of this bulge is conserved across sgNA that interact with different CasX proteins. An exemplary sequence of a scaffold stem loop sequence of a gNA comprises the sequence CCAGCGACUAUGUCGUAUGG (SEQ ID NO: 20). In other embodiments, the disclosure provides gNA variants wherein the scaffold stem loop is replaced with an RNA stem loop sequence from a heterologous RNA source with proximal 5′ and 3′ ends, such as, but not limited to stem loop sequences selected from MS2, Q β, U1 hairpin II, Uvsx, or PP7 stem loops. In some cases, the heterologous RNA stem loop of the gNA is capable of binding a protein, an RNA structure, a DNA sequence, or a small molecule.

[0111] c. Extended Stem Loop

[0112] In some embodiments of the CasX sgNAs of the disclosure, the scaffold stem loop is followed by the extended stem loop. In some embodiments, the extended stem comprises a synthetic tracr and crRNA fusion that is largely unbound by the CasX protein. In some embodiments, the extended stem loop can be highly malleable. In some embodiments, a single guide gRNA is made with a GAAA tetraloop linker or a GAGAAA linker between the tracr and crRNA in the extended stem loop. In some cases, the targeter and activator of a CasX sgNA are linked to one another by intervening nucleotides and the linker can have a length of from 3 to 20 nucleotides. In some embodiments of the CasX sgNAs of the disclosure, the extended stem is a large 32-bp loop that sits outside of the CasX protein in the ribonucleoprotein complex. An exemplary sequence of an extended stem loop sequence of a sgNA comprises the sequence GCGCUUAUUUAUCGGAGAGAAAUCCGAUAAAUAAGAAGC (SEQ ID NO: 21). In some embodiments, the extended stem loop comprises a GAGAAA spacer sequence. In some embodiments, the disclosure provides gNA variants wherein the extended stem loop is replaced with an RNA stem loop sequence from a heterologous RNA source with proximal 5′ and 3′ ends, such as, but not limited to stem loop sequences selected from MS2, Qβ, U1 hairpin II, Uvsx, or PP7 stem loops. In such cases, the heterologous RNA stem loop increases the stability of the gNA. In other embodiments, the disclosure provides gNA variants having an extended stem loop region comprising at least 10, at least 100, at least 500, at least 1000, or at least 10,000 nucleotides, or at least 10-10,000, at least 10-1000, or at least 10-100 nucleotides.

[0113] d. Targeting Sequence

[0114] In some embodiments of the gNAs of the disclosure, the extended stem loop is followed by a region that forms part of the triplex, and then the targeting sequence (or “spacer”) at the 3′ end of the gNA. The targeting sequence targets the CasX ribonucleoprotein holo complex (i.e., the RNP) to a specific region of the target nucleic acid sequence of the gene to be modified. Thus, for example, gNA targeting sequences of the disclosure have sequences complementarity to, and therefore can hybridize to, a portion of the PCSK9 gene in a nucleic acid in a eukaryotic cell (e.g., a eukaryotic chromosome, chromosomal sequence, a eukaryotic RNA, etc.) as a component of the RNP when the TC PAM motif or any one of the PAM sequences TTC, ATC, GTC, or CTC is located 1 nucleotide 5′ to the non-target strand sequence complementary to the target sequence. The targeting sequence of a gNA can be modified so that the gNA can target a desired sequence of any desired target nucleic acid sequence, so long as the PAM sequence location is taken into consideration. In some embodiments, the gNA scaffold is 5′ of the targeting sequence, with the targeting sequence on the 3′ end of the gNA. In some embodiments, the PAM motif sequence recognized by the nuclease of the RNP is TC. In other embodiments, the PAM sequence recognized by the nuclease of the RNP is NTC.

[0115] In some embodiments, the targeting sequence of the gNA is complementary to a portion of a gene encoding a PCSK9 protein, which may comprise one or more mutations. In some embodiments, the targeting sequence of a gNA is complementary to a PCSK9 exon selected from the group consisting of exon 1, exon 2, exon 3, exon 4, exon 5, exon 6, exon 7, exon 8, exon 9, exon 10, exon 11, and exon 12. In some embodiments, the targeting sequence of a gNA is specific for a PCSK9 intron. In some embodiments, the targeting sequence of the gNA is specific for a PCSK9 intron-exon junction. In some embodiments, the targeting sequence of the gNA is complementary to a sequence comprising one or more single nucleotide polymorphisms (SNPs) of the PCSK9 gene or its complement. SNPs that are within PCSK9 coding sequence or within PCSK9 non-coding sequence are both within the scope of the instant disclosure. In other embodiments, the targeting sequence of the gNA is complementary to a sequence of an intergenic region of the PCSK9 gene or a sequence complementary to an intergenic region of the PCSK9 gene. In other embodiments, the targeting sequence of a gNA is complementary to a regulatory element of the PCSK9 gene. In those cases where the targeting sequence is specific for a regulatory element, such regulatory elements include, but are not limited to promoter regions, enhancer regions, intergenic regions, 5′ untranslated regions (5′ UTR), 3′ untranslated regions (3′ UTR), conserved elements, and regions comprising cis-regulatory elements. The promoter region is intended to encompass nucleotides within 5 kb of the initiation point of the encoding sequence or, in the case of gene enhancer elements or conserved elements, can be thousands of bp, hundreds of thousands of bp, or even millions of bp away from the encoding sequence of the gene of the target nucleic acid. In the foregoing, the targets are those in which the encoding gene of the target is intended to be knocked out or knocked down such that the targeted protein is not expressed or is expressed at a lower level in a cell.

[0116] In some embodiments, the targeting sequence has between 14 and 35 consecutive nucleotides. In some embodiments, the targeting sequence has 14, 15, 16, 18, 18, 19, 20, 21, 22, 23 24, 25, 26, 27, 28, 29, 30, 31, 32, 33, 34 or 35 consecutive nucleotides. In some embodiments, the targeting sequence consists of 20 consecutive nucleotides. In some embodiments, the targeting sequence consists of 19 consecutive nucleotides. In some embodiments, the targeting sequence consists of 18 consecutive nucleotides. In some embodiments, the targeting sequence consists of 17 consecutive nucleotides. In some embodiments, the targeting sequence consists of 16 consecutive nucleotides. In some embodiments, the targeting sequence consists of 15 consecutive nucleotides and the targeting sequence can comprise 0 to 5, 0 to 4, 0 to 3, or 0 to 2 mismatches relative to the target nucleic acid sequence and retain sufficient binding specificity such that the RNP comprising the gNA comprising the targeting sequence can form a complementary bond with respect to the target nucleic acid.

[0117] Representative, but non-limiting examples of targeting sequences to wild-type PCSK9 nucleic acid are presented as SEQ ID NOS: 315-436, 612-2100, and 2286-13861, and are shown below as Table A, representing targeting sequences for PCSK9 target nucleic acid. In one embodiment, the targeting sequence of the gNA comprises a sequence having at least about 65%, at least about 75%, at least about 85%, or at least about 95% identity to a sequence selected from the group consisting of SEQ ID NOS: 315-436, 612-2100, and 2286-13861. In another embodiment, the targeting sequence of the gNA consists of a sequence selected from the group consisting of SEQ ID NOS: 315-436, 612-2100, and 2286-13861. In the foregoing embodiments, thymine (T) nucleotides can be substituted for one or more or all of the uracil (U) nucleotides in any of the targeting sequences such that the gNA can be a gDNA or a gRNA, or a chimera of RNA and DNA. In some embodiments, a targeting sequence selected from the group consisting of SEQ ID NOS: 315-436, 612-2100, and 2286-13861 has at least 1, 2, 3, 4, 5, or 6 or more thymine nucleotides substituted for uracil nucleotides. In other embodiments, a gNA, gRNA, or gDNA of the disclosure comprises 1, 2, 3 or more targeting sequences selected from the group consisting of SEQ ID NOS: 315-436, 612-2100, and 2286-13861, or targeting sequences that are at least 50% identical, at least 55% identical, at least 60% identical, at least 65% identical, at least 70% identical, at least 75% identical, at least 80% identical, at least 85% identical, at least 90% identical, at least 95% identical to one or more sequences of SEQ ID NOS: 315-436, 612-2100, and 2286-13861. In some embodiments, the targeting sequence of the gNA comprises a sequence selected from the group consisting of SEQ ID NOS: 315-436, 612-2100, and 2286-13861 with a single nucleotide removed from the 3′ end of the sequence. In other embodiments, the targeting sequence of the gNA comprises a sequence o selected from the group consisting of SEQ ID NOS: 315-436, 612-2100, and 2286-13861 with two nucleotides removed from the 3′ end of the sequence. In other embodiments, the targeting sequence of the gNA comprises a sequence selected from the group consisting of SEQ ID NOS: 315-436, 612-2100, and 2286-13861 with three nucleotides removed from the 3′ end of the sequence. In other embodiments, the targeting sequence of the gNA comprises a sequence selected from the group consisting of SEQ ID NOS: 315-436, 612-2100, and 2286-13861 with four nucleotides removed from the 3′ end of the sequence. In other embodiments, the targeting sequence of the gNA comprises a sequence selected from the group consisting of SEQ ID NOS: 315-436, 612-2100, and 2286-13861 with five nucleotides removed from the 3′ end of the sequence.

TABLE A
Targeting Sequences Specific to PCSK9

| | PAM |
|---|---|
| SEQ ID NO: | Sequence |
| 315-436, 612-2, 100, | ATCN |
| 2,286-3,183 | |
| 3,184-7,251 | TTCN |
| 7,252-11,521 | CTCN |
| 11,522-13, 861 | GTCN |

[0118] In some embodiments, the targeting sequence is complementary to a nucleic acid sequence encoding a mutation of the PCSK9 protein of SEQ ID NO: 33 or mutations that disrupt the function or expression of the PCSK9 protein. Several missense mutations (S127R, D129G, F216L, D374H, and D374Y) are associated with hypercholesterolemia and premature atherosclerosis; hence are considered gain-of-function mutations (Shilpa Pandit, S., et al. Functional analysis of sites within PCSK9 responsible for hypercholesterolemias. J Lipid Res., 49:1333 (2008)), and the disclosure contemplates targeting sequences that are complementary to DNA sequences encoding these mutations in the PCSK9 gene, including a sequence selected from the group consisting of AGCAGGUCGCCUCUCAUCUU (SEQ ID NO: 272), CAUCUUCACCAGGAAGCCAG (SEQ ID NO: 273), CCUCUCAUCUUCACCAGGAA (SEQ ID NO: 274), UGGUGAAGAUGAGAGGCGAC (SEQ ID NO: 275), GUGGAGGCGGGUCCCGUCCU (SEQ ID NO: 281), AGCCACUGCAGCACCUGCUU (SEQ ID NO: 287), UUGGUGCCUCCAGCCACUGC (SEQ ID NO: 288), AGCUACUGCAGCACCUGCUU (SEQ ID NO: 289), and UUGGUGCCUCCAGCUACUGC (SEQ ID NO: 290).

[0119] Several mutations are considered loss of function mutations, including R46L, G106R, Y142X, N157K, R237W and C679X, and are associated with hypocholesterolemia (Berke, K., et al. Missense Mutations in the PCSK9 Gene Are Associated With Hypocholesterolemia and Possibly Increased Response to Statin Therapy. Arteriosclerosis Thrombosis and Vascular Biol. 26:1094 (2006)), and the disclosure contemplates targeting sequences that are complementary to DNA sequences encoding these mutations in the PCSK9 gene. Exemplary targeting sequences specific to PCSK9 mutations, and the ClinVar (/www.ncbi.nlm.nih.gov/clinvar/) identifiers of the PCSK9 mutations targeted by the spacers, are presented in Table B below.

TABLE B
Targeting Sequences for PCSK9 Mutations

| | | SEQ |
|---|---|---|
| | | ID |
| Name | Sequence | NO: |
| VCV000431555 | UGGUGGCCGCUGCCAUGCUG | 24 |
| VCV000440705 | CACGGGCGCCCGUGCGCAGG | 248 |
| VCV000440705 | UGCGCACGGGCGCCCGUGGG | 249 |
| VCV000440705 | UGGGUCCCACGGGCGCCCGU | 250 |
| VCV000496566 | CGCGGGCGCCGUGCGCAGGA | 251 |
| VCV000496566 | UCCUCCUGCGCACGGCGCCC | 252 |
| VCV000496566 | UCCUGCGCACGGCGCCCGCG | 253 |
| VCV000496566 | UGCGCACGGCGCCCGCGGGA | 254 |
| VCV000496566 | UGGGUCCCGCGGGCGCCGUG | 255 |
| VCV000440706 | CAACGCAAGGCUAGCACCAG | 256 |
| VCV000440706 | UCCUCGCAACGCAAGGCUAG | 257 |
| VCV000440706 | UCGCAACGCAAGGCUAGCAC | 258 |
| VCV000440708 | CCCAGGCCGUCCUCCUCGGA | 259 |
| VCV000440708 | GAGGAGGACGGCCUGGGCGA | 260 |
| VCV000440708 | GGUGCUUCGCCCAGGCCGUC | 261 |
| VCV000440708 | GUGCUCGGGUGCUUCGCCCA | 262 |
| VCV000265918 | GUGGUUCCGUGCUCGGGUGC | 263 |
| VCV000440709 | CAUCCCUACACCUGCACCUU | 264 |
| VCV000440709 | CUACACCUGCACCUUGGCGC | 265 |
| VCV000440712 | CCUCCGUCAGCACCACCACG | 266 |
| VCV000440712 | GUCAGCACCACCACGUAGGU | 267 |
| VCV000440712 | UCCGUCAGCACCACCACGUA | 268 |
| VCV000440714 | GAGCGCACUGCCUGCCGCCU | 269 |
| VCV000440715 | UGGUGGGGUAUCCCCGGCGG | 270 |
| VCV000375849 | UGGUGGGGUAUCCCCGGCGG | 271 |
| VCV000002873 | AGCAGGUCGCCUCUCAUCUU | 272 |
| VCV000002873 | CAUCUUCACCAGGAAGCCAG | 273 |
| VCV000002873 | CCUCUCAUCUUCACCAGGAA | 274 |
| VCV000002873 | UGGUGAAGAUGAGAGGCGAC | 275 |
| VCV000189308 | AAGUUGGUGACCAUGACCCU | 276 |
| VCV000189308 | CCAACUUCGAGAAUGUGCCC | 277 |
| VCV000189308 | CGAAGUUGGUGACCAUGACC | 278 |
| VCV000189308 | GGCACAUUCUCGAAGUUGGU | 279 |
| VCV000189308 | UGGUCACCAACUUCGAGAAU | 280 |
| VCV000002874 | GUGGAGGCGGGUCCCGUCCU | 281 |
| VCV000440717 | CACUUGCUGGCCUGCUAGAC | 282 |
| VCV000440717 | UCUAGCAGGCCAGCAAGUGU | 283 |
| VCV000440717 | UUGUGUUCGUCUAGCAGGCC | 284 |
| VCV000438337 | ACACAGCGGCCAAAGAUGGU | 285 |
| VCV000438337 | UUGGCCGCUGUGUGGACCUC | 286 |
| VCV000265939 | AGCCACUGCAGCACCUGCUU | 287 |
| VCV000265939 | UUGGUGCCUCCAGCCACUGC | 288 |
| VCV000002875 | AGCUACUGCAGCACCUGCUU | 289 |
| VCV000002875 | UUGGUGCCUCCAGCUACUGC | 290 |
| VCV000440720 | CAGGCUGCUGCCCACAUGGC | 291 |
| VCV000440721 | GCACACUCGGGGCCUGCACG | 292 |
| VCV000440721 | GGGCCUGCACGGAUGGCCAC | 293 |
| VCV000440721 | GUGCAGGCCCCGAGUGUGCU | 294 |
| VCV000440722 | ACAGCCGUCGCCCGCUGCGC | 295 |
| VCV000440722 | GGGCCUACACGGAUGUCCAC | 296 |
| VCV000440723 | CCUGCUGCGCCCCAGAUGAG | 297 |
| VCV000440723 | GGGGCGCAGCAGGCGACGGC | 298 |
| VCV000440723 | UCAUCUGGGGCGCAGCAGGC | 299 |
| VCV000440723 | UCUGGGGCGCAGCAGGCGAC | 300 |
| VCV000440724 | AUGCGCUCGCCCCGCCGCUU | 301 |
| VCV000440724 | CUUCCAUGCGCUCGCCCCGC | 302 |
| VCV000440725 | CGGCCCCUUGGCUGGUGCUG | 303 |

[0120] Representative, but non-limiting examples of targeting sequences to mutant PCSK9 nucleic acids are presented as SEQ ID NOS: 247-303, and are shown supra as Table B. In one embodiment, the targeting sequence of the gNA comprises a sequence having at least about 65%, at least about 75%, at least about 85%, or at least about 95% identity to a sequence selected from the group consisting of SEQ ID NOS: 247-303. In another embodiment, the targeting sequence of the gNA consists of a sequence selected from the group consisting of SEQ ID NOS: 247-303. In some embodiments, a targeting sequence selected from the group consisting of SEQ ID NOS: 247-303 has at least 1, 2, 3, 4, 5, or 6 or more thymine nucleotides substituted for uracil nucleotides. In other embodiments, the disclosure provides CasX:gNA systems comprising 1, 2, 3 or more gNA comprising targeting sequences selected from the group consisting of SEQ ID NOS: 247-303, or targeting sequences that are at least 50% identical, at least 55% identical, at least 60% identical, at least 65% identical, at least 70% identical, at least 75% identical, at least 80% identical, at least 85% identical, at least 90% identical, at least 95% identical to one or more sequences of SEQ ID NOs: 247-303. In some embodiments, the targeting sequence of the gNA comprises a sequence selected from the group consisting of SEQ ID NOS: 247-303 with a single nucleotide removed from the 3′ end of the sequence. In other embodiments, the targeting sequence of the gNA comprises a sequence o selected from the group consisting of SEQ ID NOS: 247-303 with two nucleotides removed from the 3′ end of the sequence. In other embodiments, the targeting sequence of the gNA comprises a sequence selected from the group consisting of SEQ ID NOS: 247-303 with three nucleotides removed from the 3′ end of the sequence. In other embodiments, the targeting sequence of the gNA comprises a sequence selected from the group consisting of SEQ ID NOS: 3247-303 with four nucleotides removed from the 3′ end of the sequence. In other embodiments, the targeting sequence of the gNA comprises a sequence selected from the group consisting of SEQ ID NOS: 247-303 with five nucleotides removed from the 3′ end of the sequence.

[0121] In some embodiments, the CasX:gNA system comprises a first gNA and further comprises a second (and optionally a third, fourth, fifth, or more) gNA, wherein the second gNA or additional gNA has a targeting sequence complementary to a different or overlapping portion of the target nucleic acid sequence compared to the targeting sequence of the first gNA such that multiple points in the target nucleic acid are targeted, and, for example, multiple breaks are introduced in the target nucleic acid by the CasX. It will be understood that in such cases, the second or additional gNA is complexed with an additional copy of the CasX protein. By selection of the targeting sequences of the gNA, defined regions of the target nucleic acid sequence bracketing a particular location within the target nucleic acid can be modified or edited using the CasX:gNA systems described herein, including facilitating the insertion of a donor template or excision of a region or exon comprising a mutation of the PCSK9 gene.

[0122] e. gNA Scaffolds

[0123] With the exception of the targeting sequence domain, the remaining components of the gNA are referred to herein as the scaffold. In some embodiments, the gNA scaffolds are derived from naturally-occurring sequences, described below as reference gNA. In other embodiments, the gNA scaffolds are variants of reference gNA wherein mutations, insertions, deletions or domain substitutions are introduced to confer desirable properties on the gNA.

[0124] In some embodiments, a CasX reference gRNA comprises a sequence isolated or derived from Deltaproteobacter. In some embodiments, the sequence is a CasX tracrRNA sequence. Exemplary CasX reference tracrRNA sequences isolated or derived from Deltaproteobacter may include: ACAUCUGGCGCGUUUAUUCCAUUACUUUGGAGCCAGUCCCAGCGACUAUGUCGU AUGGACGAAGCGCUUAUUUAUCGGAGA (SEQ ID NO: 22) and ACAUCUGGCGCGUUUAUUCCAUUACUUUGGAGCCAGUCCCAGCGACUAUGUCGU AUGGACGAAGCGCUUAUUUAUCGG (SEQ ID NO: 23). Exemplary crRNA sequences isolated or derived from Deltaproteobacter may comprise a sequence of CCGAUAAGUAAAACGCAUCAAAG (SEQ ID NO: 24). In some embodiments, a CasX reference gNA comprises a sequence at least 60% identical, at least 65% identical, at least 70% identical, at least 75% identical, at least 80% identical, at least 81% identical, at least 82% identical, at least 83% identical, at least 84% identical, at least 85% identical, at least 86% identical, at least 86% identical, at least 87% identical, at least 88% identical, at least 89% identical, at least 89% identical, at least 90% identical, at least 91% identical, at least 92% identical, at least 93% identical, at least 94% identical, at least 95% identical, at least 96% identical, at least 97% identical, at least 98% identical, at least 99% identical, at least 99.5% identical or 100% identical to a sequence isolated or derived from Deltaproteobacter.

[0125] In some embodiments, a CasX reference guide RNA comprises a sequence isolated or derived from Planctomycetes. In some embodiments, the sequence is a CasX tracrRNA sequence. Exemplary CasX reference tracrRNA sequences isolated or derived from Planctomycetes may include: UACUGGCGCUUUUAUCUCAUUACUUUGAGAGCCAUCACCAGCGACUAUGUCGUA UGGGUAAAGCGCUUAUUUAUCGGAGA (SEQ ID NO: 8) and UACUGGCGCUUUUAUCUCAUUACUUUGAGAGCCAUCACCAGCGACUAUGUCGUA UGGGUAAAGCGCUUAUUUAUCGG (SEQ ID NO: 9). Exemplary crRNA sequences isolated or derived from Planctomycetes may comprise a sequence of UCUCCGAUAAAUAAGAAGCAUCAAAG (SEQ ID NO: 27). In some embodiments, a CasX reference gNA comprises a sequence at least 60% identical, at least 65% identical, at least 70% identical, at least 75% identical, at least 80% identical, at least 81% identical, at least 82% identical, at least 83% identical, at least 84% identical, at least 85% identical, at least 86% identical, at least 86% identical, at least 87% identical, at least 88% identical, at least 89% identical, at least 89% identical, at least 90% identical, at least 91% identical, at least 92% identical, at least 93% identical, at least 94% identical, at least 95% identical, at least 96% identical, at least 97% identical, at least 98% identical, at least 99% identical, at least 99.5% identical or 100% identical to a sequence isolated or derived from Planctomycetes.

[0126] In some embodiments, a CasX reference gNA comprises a sequence isolated or derived from Candidatus Sungbacteria. In some embodiments, the sequence is a CasX tracrRNA sequence. Exemplary CasX reference tracrRNA sequences isolated or derived from Candidatus Sungbacteria may comprise sequences of: GUUUACACACUCCCUCUCAUAGGGU (SEQ ID NO: 10), GUUUACACACUCCCUCUCAUGAGGU (SEQ ID NO: 11), UUUUACAUACCCCCUCUCAUGGGAU (SEQ ID NO: 12) and GUUUACACACUCCCUCUCAUGGGGG (SEQ ID NO: 13). In some embodiments, a CasX reference guide RNA comprises a sequence at least 60% identical, at least 65% identical, at least 70% identical, at least 75% identical, at least 80% identical, at least 81% identical, at least 82% identical, at least 83% identical, at least 84% identical, at least 85% identical, at least 86% identical, at least 86% identical, at least 87% identical, at least 88% identical, at least 89% identical, at least 89% identical, at least 90% identical, at least 91% identical, at least 92% identical, at least 93% identical, at least 94% identical, at least 95% identical, at least 96% identical, at least 97% identical, at least 98% identical, at least 99% identical, at least 99.5% identical or 100% identical to a sequence isolated or derived from Candidatus Sungbacteria.

[0127] Table 1 provides the sequences of reference gRNAs tracr and scaffold sequences. In some embodiments, the disclosure provides gNA sequences wherein the gNA has a scaffold comprising a sequence having at least one nucleotide modification relative to a reference gNA sequence having a sequence of any one of SEQ ID NOS:4-16 of Table 1. It will be understood that in those embodiments wherein a vector comprises a DNA encoding sequence for a gNA, or where a gNA is a gDNA or a chimera of RNA and DNA, that thymine (T) bases can be substituted for the uracil (U) bases of any of the gNA sequence embodiments described herein, including the sequences of Table 1 and Table 2.

TABLE 1
Reference gRNA tracr and scaffold sequences

| SEQ | |
|---|---|
| ID | |
| NO. | Nucleotide Sequence |
| 4 | ACAUCUGGCGCGUUUAUUCCAUUACUUUGGAGCCAGUCCCAGCGACUAUGUCG |
| | UAUGGACGAAGCGCUUAUUUAUCGGAGAGAAACCGAUAAGUAAAACGCAUCAA |
| | AG |
| 5 | UACUGGCGCUUUUAUCUCAUUACUUUGAGAGCCAUCACCAGCGACUAUGUCGU |
| | AUGGGUAAAGCGCUUAUUUAUCGGAGAGAAAUCCGAUAAAUAAGAAGCAUCAA |
| | AG |
| 6 | ACAUCUGGCGCGUUUAUUCCAUUACUUUGGAGCCAGUCCCAGCGACUAUGUCG |
| | UAUGGACGAAGCGCUUAUUUAUCGGAGA |
| 7 | ACAUCUGGCGCGUUUAUUCCAUUACUUUGGAGCCAGUCCCAGCGACUAUGUCG |
| | UAUGGACGAAGCGCUUAUUUAUCGG |
| 8 | UACUGGCGCUUUUAUCUCAUUACUUUGAGAGCCAUCACCAGCGACUAUGUCGU |
| | AUGGGUAAAGCGCUUAUUUAUCGGAGA |
| 9 | UACUGGCGCUUUUAUCUCAUUACUUUGAGAGCCAUCACCAGCGACUAUGUCGU |
| | AUGGGUAAAGCGCUUAUUUAUCGG |
| 10 | GUUUACACACUCCCUCUCAUAGGGU |
| 11 | GUUUACACACUCCCUCUCAUGAGGU |
| 12 | UUUUACAUACCCCCUCUCAUGGGAU |
| 13 | GUUUACACACUCCCUCUCAUGGGGG |
| 14 | CCAGCGACUAUGUCGUAUGG |
| 15 | GCGCUUAUUUAUCGGAGAGAAAUCCGAUAAAUAAGAAGC |
| 16 | GGCGCUUUUAUCUCAUUACUUUGAGAGCCAUCACCAGCGACUAUGUCGUAUGG |
| | GUAAAGCGCUUAUUUAUCGGA |

[0128] f. gNA Variants

[0129] In another aspect, the disclosure relates to guide nucleic acid variants (referred to herein alternatively as “gNA variant” or “gRNA variant”), which comprise one or more modifications relative to a reference gRNA scaffold. As used herein, “scaffold” refers to all parts to the gNA necessary for gNA function with the exception of the spacer sequence.

[0130] In some embodiments, the scaffold of the gNA variant is a variant comprising one or more additional changes to a sequence of a reference gRNA that comprises SEQ ID NO:4 or SEQ ID NO:5. In those embodiments where the scaffold of the reference gRNA is derived from SEQ ID NO:4 or SEQ ID NO:5, the one or more improved or added characteristics of the gNA variant are improved compared to the same characteristic in SEQ ID NO:4 or SEQ ID NO:5. In some embodiments, a gNA variant comprises one or more nucleotide substitutions, insertions, deletions, or swapped or replaced regions relative to a reference gRNA sequence of the disclosure. In some embodiments, a mutation can occur in any region of a reference gRNA to produce a gNA variant. In some embodiments, the scaffold of the gNA variant sequence has at least 20%, at least 30%, at least 40%, at least 50%, at least 60%, or at least 70%, at least 80%, at least 85%, at least about 90%, at least about 95%, at least about 96%, at least about 97%, at least about 98%, or at least about 99% identity to the sequence of SEQ ID NO:4 or SEQ ID NO:5.

[0131] In some embodiments, a gNA variant comprises one or more nucleotide changes within one or more regions of the reference gRNA that improve a characteristic of the reference gRNA. Exemplary regions include the RNA triplex, the pseudoknot, the scaffold stem loop, and the extended stem loop. In some cases, the variant scaffold stem further comprises a bubble. In other cases, the variant scaffold further comprises a triplex loop region. In still other cases, the variant scaffold further comprises a 5′ unstructured region. In one embodiment, the gNA variant scaffold comprises a scaffold stem loop having at least 60% sequence identity to SEQ ID NO:14. In another embodiment, the gNA variant comprises a scaffold stem loop having the sequence of CCAGCGACUAUGUCGUAGUGG (SEQ ID NO: 32). In another embodiment, the disclosure provides a gNA scaffold comprising, relative to SEQ ID NO:5, a C18G substitution, a G55 insertion, a U1 deletion, and a modified extended stem loop in which the original 6 nt loop and 13 most-loop-proximal base pairs (32 nucleotides total) are replaced by a Uvsx hairpin (4 nt loop and 5 loop-proximal base pairs; 14 nucleotides total) and the loop-distal base of the extended stem was converted to a fully base-paired stem contiguous with the new Uvsx hairpin by deletion of the A99 and substitution of G64U. In the foregoing embodiment, the gNA scaffold comprises the sequence

(SEQ ID NO: 2238)
ACUGGCGCUUUUAUCUGAUUACUUUGAGAGCCAUCACCAGCGAC
UAUGUCGUAGUGGGUAAAGCUCCCUCUUCGGAGGGAGCAUCAAAG.

[0132] All gNA variants that have one or more improved functions or characteristics, or add one or more new functions when the variant gNA is compared to a reference gRNA described herein, are envisaged as within the scope of the disclosure. A representative example of such a gNA variant is guide 174 (SEQ ID NO:2238), the design of which is described in the Examples. In some embodiments, the gNA variant adds a new function to the RNP comprising the gNA variant. In some embodiments, the gNA variant has an improved characteristic selected from: improved stability; improved solubility; improved transcription of the gNA; improved resistance to nuclease activity; increased folding rate of the gNA; decreased side product formation during folding; increased productive folding; improved binding affinity to a CasX protein; improved binding affinity to a target DNA when complexed with a CasX protein; improved gene editing when complexed with a CasX protein; improved specificity of editing when complexed with a CasX protein; and improved ability to utilize a greater spectrum of one or more PAM sequences, including ATC, CTC, GTC, or TTC (also referred to as ATCN, CTCN, GTCN and TTCN PAMs), in the editing of target DNA when complexed with a CasX protein, or any combination thereof. In some cases, the one or more of the improved characteristics of the gNA variant is at least about 1.1 to about 100,000-fold improved relative to the reference gNA of SEQ ID NO:4 or SEQ ID NO:5. In other cases, the one or more improved characteristics of the gNA variant is at least about 1.1, at least about 10, at least about 100, at least about 1000, at least about 10,000, at least about 100,000-fold or more improved relative to the reference gNA of SEQ ID NO:4 or SEQ ID NO:5. In other cases, the one or more of the improved characteristics of the gNA variant is about 1.1 to 100,00-fold, about 1.1 to 10,00-fold, about 1.1 to 1,000-fold, about 1.1 to 500-fold, about 1.1 to 100-fold, about 1.1 to 50-fold, about 1.1 to 20-fold, about 10 to 100,00-fold, about 10 to 10,00-fold, about 10 to 1,000-fold, about 10 to 500-fold, about 10 to 100-fold, about 10 to 50-fold, about 10 to 20-fold, about 2 to 70-fold, about 2 to 50-fold, about 2 to 30-fold, about 2 to 20-fold, about 2 to 10-fold, about 5 to 50-fold, about 5 to 30-fold, about 5 to 10-fold, about 100 to 100,00-fold, about 100 to 10,00-fold, about 100 to 1,000-fold, about 100 to 500-fold, about 500 to 100,00-fold, about 500 to 10,00-fold, about 500 to 1,000-fold, about 500 to 750-fold, about 1,000 to 100,00-fold, about 10,000 to 100,00-fold, about 20 to 500-fold, about 20 to 250-fold, about 20 to 200-fold, about 20 to 100-fold, about 20 to 50-fold, about 50 to 10,000-fold, about 50 to 1,000-fold, about 50 to 500-fold, about 50 to 200-fold, or about 50 to 100-fold, improved relative to the reference gNA of SEQ ID NO:4 or SEQ ID NO:5. In other cases, the one or more improved characteristics of the gNA variant is about 1.1-fold, 1.2-fold, 1.3-fold, 1.4-fold, 1.5-fold, 1.6-fold, 1.7-fold, 1.8-fold, 1.9-fold, 2-fold, 3-fold, 4-fold, 5-fold, 6-fold, 7-fold, 8-fold, 9-fold, 10-fold, 11-fold, 12-fold, 13-fold, 14-fold, 15-fold, 16-fold, 17-fold, 18-fold, 19-fold, 20-fold, 25-fold, 30-fold, 40-fold, 45-fold, 50-fold, 55-fold, 60-fold, 70-fold, 80-fold, 90-fold, 100-fold, 110-fold, 120-fold, 130-fold, 140-fold, 150-fold, 160-fold, 170-fold, 180-fold, 190-fold, 200-fold, 210-fold, 220-fold, 230-fold, 240-fold, 250-fold, 260-fold, 270-fold, 280-fold, 290-fold, 300-fold, 310-fold, 320-fold, 330-fold, 340-fold, 350-fold, 360-fold, 370-fold, 380-fold, 390-fold, 400-fold, 425-fold, 450-fold, 475-fold, or 500-fold improved relative to the reference gNA of SEQ ID NO:4 or SEQ ID NO:5.

[0133] In some embodiments, a gNA variant can be created by subjecting a reference gRNA to a one or more mutagenesis methods, such as the mutagenesis methods described herein, below, which may include Deep Mutational Evolution (DME), deep mutational scanning (DMS), error prone PCR, cassette mutagenesis, random mutagenesis, staggered extension PCR, gene shuffling, or domain swapping, in order to generate the gNA variants of the disclosure. The activity of reference gRNAs may be used as a benchmark against which the activity of gNA variants are compared, thereby measuring improvements in function of gNA variants. In other embodiments, a reference gRNA may be subjected to one or more deliberate, targeted mutations, substitutions, or domain swaps in order to produce a gNA variant, for example a rationally designed variant. Exemplary gRNA variants produced by such methods are described in the Examples and representative sequences of gNA scaffolds are presented in Table 2.

[0134] In some embodiments, the gNA variant comprises one or more modifications compared to a reference guide nucleic acid scaffold sequence, wherein the one or more modification is selected from: at least one nucleotide substitution in a region of the gNA variant; at least one nucleotide deletion in a region of the gNA variant; at least one nucleotide insertion in a region of the gNA variant; a substitution of all or a portion of a region of the gNA variant; a deletion of all or a portion of a region of the gNA variant; or any combination of the foregoing. In some cases, the modification is a substitution of 1 to 15 consecutive or non-consecutive nucleotides in the gNA variant in one or more regions. In other cases, the modification is a deletion of 1 to 10 consecutive or non-consecutive nucleotides in the gNA variant in one or more regions. In other cases, the modification is an insertion of 1 to 10 consecutive or non-consecutive nucleotides in the gNA variant in one or more regions. In other cases, the modification is a substitution of the scaffold stem loop or the extended stem loop with an RNA stem loop sequence from a heterologous RNA source with proximal 5′ and 3′ ends. In some cases, a gNA variant of the disclosure comprises two or more modifications in one region. In other cases, a gNA variant of the disclosure comprises modifications in two or more regions. In other cases, a gNA variant comprises any combination of the foregoing modifications described in this paragraph.

[0135] In some embodiments, a 5′ G is added to a gNA variant sequence for expression in vivo, as transcription from a U6 promoter is more efficient and more consistent with regard to the start site when the +1 nucleotide is a G. In other embodiments, two 5′ Gs are added to a gNA variant sequence for in vitro transcription to increase production efficiency, as T7 polymerase strongly prefers a G in the +1 position and a purine in the +2 position. In some cases, the 5′ G bases are added to the reference scaffolds of Table 1. In other cases, the 5′ G bases are added to the variant scaffolds of Table 2.

[0136] Table 2 provides exemplary gNA variant scaffold sequences. In Table 2, (−) indicates a deletion at the specified position(s) relative to the reference sequence of SEQ ID NO:5, (+) indicates an insertion of the specified base(s) at the position indicated relative to SEQ ID NO:5, (:) indicates the range of bases at the specified start:stop coordinates of a deletion or substitution relative to SEQ ID NO:5, and multiple insertions, deletions or substitutions are separated by commas; e.g., A14C, U17G. In some embodiments, the gNA variant scaffold comprises any one of SEQ ID NOS: 2101-2285 as listed in Table 2, or a sequence having at least about 50%, at least about 60%, at least about 70%, at least about 80%, at least about 90%, at least about 95%, at least about 95%, at least about 96%, at least about 97%, at least about 98%, at least about 99% sequence identity thereto. In some embodiments, the gNA variant scaffold comprises or consists essentially of a sequence selected from the group consisting of SEQ ID NOS: 2101-2285 as set forth in Table 2. It will be understood that in those embodiments wherein a vector comprises a DNA encoding sequence for a gNA, or where a gNA is a gDNA or a chimera of RNA and DNA, that thymine (T) bases can be substituted for the uracil (U) bases of any of the gNA sequence embodiments described herein.

TABLE 2
Exemplary gNA Scaffold Sequences

| SEQ | | |
|---|---|---|
| ID | NAME or | |
| NO: | Modification | NUCLEOTIDE SEQUENCE |
| 2101 | phage | UACUGGCGCUUUUAUCUCAUUACUUUGAGAGCCAUCACCAGCGACUA |
| | replication | UGUCGUAUGGGUAAAGCGCAGGUGGGACGACCUCUCGGUCGUCCUAU |
| | stable | CUGAAGCAUCAAAG |
| 2102 | Kissing | UACUGGCGCUUUUAUCUCAUUACUUUGAGAGCCAUCACCAGCGACUA |
| | loop_b1 | UGUCGUAUGGGUAAAGCGCUGCUCGACGCGUCCUCGAGCAGAAGCAU |
| | | CAAAG |
| 2103 | Kissing | UACUGGCGCUUUUAUCUCAUUACUUUGAGAGCCAUCACCAGCGACUA |
| | loopa | UGUCGUAUGGGUAAAGCGCUGCUCGCUCCGUUCGAGCAGAAGCAUCA |
| | | AAG |
| 2104 | 32:uvsX | GUACUGGCGCUUUUAUCUCAUUACUUUGAGAGCCAUCACCAGCGACU |
| | hairpin | AUGUCGUAUGGGUAAAGCGCCCUCUUCGGAGGGAAGCAUCAAAG |
| 2105 | PP7 | UACUGGCGCUUUUAUCUCAUUACUUUGAGAGCCAUCACCAGCGACUA |
| | | UGUCGUAUGGGUAAAGCGCAGGAGUUUCUAUGGAAACCCUGAAGCAU |
| | | CAAAG |
| 2106 | 64:trip mut, | GUACUGGCGCCUUUAUCUCAUUACUUUGAGAGCCAUCACCAGCGACU |
| | extended stem | AUGUCGUAUGGGUAAAGCGCUUACGGACUUCGGUCCGUAAGAAGCAU |
| | truncation | CAAAG |
| 2107 | hyperstable | UACUGGCGCUUUUAUCUCAUUACUUUGAGAGCCAUCACCAGCGACUA |
| | tetraloop | UGUCGUAUGGGUAAAGCGCUGCGCUUGCGCAGAAGCAUCAAAG |
| 2108 | C18G | UACUGGCGCUUUUAUCUGAUUACUUUGAGAGCCAUCACCAGCGACUA |
| | | UGUCGUAUGGGUAAAGCGCUUAUUUAUCGGAGAGAAAUCCGAUAAAU |
| | | AAGAAGCAUCAAAG |
| 2109 | U17G | UACUGGCGCUUUUAUCGCAUUACUUUGAGAGCCAUCACCAGCGACUA |
| | | UGUCGUAUGGGUAAAGCGCUUAUUUAUCGGAGAGAAAUCCGAUAAAU |
| | | AAGAAGCAUCAAAG |
| 2110 | CUUCGG | UACUGGCGCUUUUAUCUCAUUACUUUGAGAGCCAUCACCAGCGACUA |
| | loop | UGUCGUAUGGGUAAAGCGCUUAUUUAUCGGAGACUUCGGUCCGAUAA |
| | | AUAAGAAGCAUCAAAG |
| 2111 | MS2 | UACUGGCGCUUUUAUCUCAUUACUUUGAGAGCCAUCACCAGCGACUA |
| | | UGUCGUAUGGGUAAAGCGCACAUGAGGAUUACCCAUGUGAAGCAUCA |
| | | AAG |
| 2112 | −1, A2G, −78, | GCUGGCGCUUUUAUCUCAUUACUUUGAGAGCCAUCACCAGCGACUAU |
| | G77U | GUCGUAUGGGUAAAGCGCUUAUUUAUCGUGAGAAAUCCGAUAAAUAA |
| | | GAAGCAUCAAAG |
| 2113 | QB | UACUGGCGCUUUUAUCUCAUUACUUUGAGAGCCAUCACCAGCGACUA |
| | | UGUCGUAUGGGUAAAGCGCUGCAUGUCUAAGACAGCAGAAGCAUCAA |
| | | AG |
| 2114 | 45, 44 hairpin | UACUGGCGCUUUUAUCUCAUUACUUUGAGAGCCAUCACCAGCGACUA |
| | | UGUCGUAUGGGUAAAGCGCAGGGCUUCGGCCGAAGCAUCAAAG |
| 2115 | UIA | UACUGGCGCUUUUAUCUCAUUACUUUGAGAGCCAUCACCAGCGACUA |
| | | UGUCGUAUGGGUAAAGCGCAAUCCAUUGCACUCCGGAUUGAAGCAUC |
| | | AAAG |
| 2116 | A14C, U17G | UACUGGCGCUUUUCUCGCAUUACUUUGAGAGCCAUCACCAGCGACUA |
| | | UGUCGUAUGGGUAAAGCGCUUAUUUAUCGGAGAGAAAUCCGAUAAAU |
| | | AAGAAGCAUCAAAG |
| 2117 | CUUCGG | UACUGGCGCUUUUAUCUCAUUACUUUGAGAGCCAUCACCAGCGACUA |
| | loop modified | UGUCGUAUGGGUAAAGCGCUUAUUUAUCGGACUUCGGUCCGAUAAAU |
| | | AAGAAGCAUCAAAG |
| 2118 | Kissing | UACUGGCGCUUUUAUCUCAUUACUUUGAGAGCCAUCACCAGCGACUA |
| | loop_b2 | UGUCGUAUGGGUAAAGCGCUGCUCGUUUGCGGCUACGAGCAGAAGCA |
| | | UCAAAG |
| 2119 | −76:78, −83:87 | UACUGGCGCUUUUAUCUCAUUACUUUGAGAGCCAUCACCAGCGACUA |
| | | UGUCGUAUGGGUAAAGCGCUUAUUUAUCGAGAGAUAAAUAAGAAGCA |
| | | UCAAAG |
| 2120 | −4 | UACGGCGCUUUUAUCUCAUUACUUUGAGAGCCAUCACCAGCGACUAU |
| | | GUCGUAUGGGUAAAGCGCUUAUUUAUCGGAGAGAAAUCCGAUAAAUA |
| | | AGAAGCAUCAAAG |
| 2121 | extended stem | UACUGGCGCCUUUUAUCUCAUUACUUUGAGAGCCAUCACCAGCGACU |
| | truncation | AUGUCGUAUGGGUAAAGCGCUUACGGACUUCGGUCCGUAAGAAGCAU |
| | | CAAAG |
| 2122 | C55 | UACUGGCGCUUUUAUCUCAUUACUUUGAGAGCCAUCACCAGCGACUA |
| | | UGUCGUAUCGGUAAAGCGCUUAUUUAUCGGAGAGAAAUCCGAUAAAU |
| | | AAGAAGCAUCAAAG |
| 2123 | trip mut | UACUGGCGCCUUUAUCUCAUUACUUUGAGAGCCAUCACCAGCGACUA |
| | | UGUCGUAUGGGUAAAGCGCUUAUUUAUCGGACUUCGGUCCGAUAAAU |
| | | AAGAAGCAUCAAAG |
| 2124 | −76:78 | UACUGGCGCUUUUAUCUCAUUACUUUGAGAGCCAUCACCAGCGACUA |
| | | UGUCGUAUGGGUAAAGCGCUUAUUUAUCGAGAAAUCCGAUAAAUAAG |
| | | AAGCAUCAAAG |
| 2125 | −1:5 | GCGCUUUUAUCUCAUUACUUUGAGAGCCAUCACCAGCGACUAUGUCG |
| | | UAUGGGUAAAGCGCUUAUUUAUCGGAGAGAAAUCCGAUAAAUAAGAA |
| | | GCAUCAAAG |
| 2126 | −83:87 | UACUGGCGCUUUUAUCUCAUUACUUUGAGAGCCAUCACCAGCGACUA |
| | | UGUCGUAUGGGUAAAGCGCUUAUUUAUCGGAGAGAGAUAAAUAAGAA |
| | | GCAUCAAAG |
| 2127 | = +G28, | UACUGGCGCUUUUAUCUCAUUACUUUGGAGAGCCAUCACCAGCGACU |
| | A82U, −84, | AUGUCGUAUGGGUAAAGCGCUUAUUUAUCGGAGAGUAUCCGAUAAAU |
| | | AAGAAGCAUCAAAG |
| 2128 | = +51U | UACUGGCGCUUUUAUCUCAUUACUUUGAGAGCCAUCACCAGCGACUA |
| | | UGUUCGUAUGGGUAAAGCGCUUAUUUAUCGGAGAGAAAUCCGAUAAA |
| | | UAAGAAGCAUCAAAG |
| 2129 | −1:4, +G5A, | AGCGCUUUUAUCUCAUUACUUUGAGAGCCAUCACCAGCGACUAUGUC |
| | +G86, | GUAUGGGUAAAGCGCUUAUUUAUCGGAGAGAAAUGCCGAUAAAUAAG |
| | | AAGCAUCAAAG |
| 2130 | = +A94 | UACUGGCGCUUUUAUCUCAUUACUUUGAGAGCCAUCACCAGCGACUA |
| | | UGUCGUAUGGGUAAAGCGCUUAUUUAUCGGAGAGAAAUCCGAUAAAA |
| | | UAAGAAGCAUCAAAG |
| 2131 | = +G72 | UACUGGCGCUUUUAUCUCAUUACUUUGAGAGCCAUCACCAGCGACUA |
| | | UGUCGUAUGGGUAAAGCGCUUAUUGUAUCGGAGAGAAAUCCGAUAAA |
| | | UAAGAAGCAUCAAAG |
| 2132 | shorten front, | GCGCUUUUAUCUCAUUACUUUGAGAGCCAUCACCAGCGACUAUGUCG |
| | CUUCGG | UAUGGGUAAAGCGCUUAUUUAUCGGACUUCGGUCCGAUAAAUAAGCG |
| | loop modified, | CAUCAAAG |
| | extend | |
| | extended | |
| 2133 | A14C | UACUGGCGCUUUUCUCUCAUUACUUUGAGAGCCAUCACCAGCGACUA |
| | | UGUCGUAUGGGUAAAGCGCUUAUUUAUCGGAGAGAAAUCCGAUAAAU |
| | | AAGAAGCAUCAAAG |
| 2134 | −1:3, +G3 | GUGGCGCUUUUAUCUCAUUACUUUGAGAGCCAUCACCAGCGACUAUG |
| | | UCGUAUGGGUAAAGCGCUUAUUUAUCGGAGAGAAAUCCGAUAAAUAA |
| | | GAAGCAUCAAAG |
| 2135 | = +C45, +U46 | UACUGGCGCUUUUAUCUCAUUACUUUGAGAGCCAUCACCAGCGACCU |
| | | UAUGUCGUAUGGGUAAAGCGCUUAUUUAUCGGAGAGAAAUCCGAUAA |
| | | AUAAGAAGCAUCAAAG |
| 2136 | CUUCGG | GAUGGCGCUUUUAUCUCAUUACUUUGAGAGCCAUCACCAGCGACUAU |
| | loop modified, | GUCGUAUGGGUAAAGCGCUUAUUUAUCGGACUUCGGUCCGAUAAAUA |
| | fun start | AGAAGCAUCAAAG |
| 2137 | −93:94 | UACUGGCGCUUUUAUCUCAUUACUUUGAGAGCCAUCACCAGCGACUA |
| | | UGUCGUAUGGGUAAAGCGCUUAUUUAUCGGAGAGAAAUCCGAUAAAA |
| | | GAAGCAUCAAAG |
| 2138 | = +U45 | UACUGGCGCUUUUAUCUCAUUACUUUGAGAGCCAUCACCAGCGAUCU |
| | | AUGUCGUAUGGGUAAAGCGCUUAUUUAUCGGAGAGAAAUCCGAUAAA |
| | | UAAGAAGCAUCAAAG |
| 2139 | −69, −94 | UACUGGCGCUUUUAUCUCAUUACUUUGAGAGCCAUCACCAGCGACUA |
| | | UGUCGUAUGGGUAAAGGCUUAUUUAUCGGAGAGAAAUCCGAUAAAAA |
| | | GAAGCAUCAAAG |
| 2140 | −94 | UACUGGCGCUUUUAUCUCAUUACUUUGAGAGCCAUCACCAGCGACUA |
| | | UGUCGUAUGGGUAAAGCGCUUAUUUAUCGGAGAGAAAUCCGAUAAAA |
| | | AGAAGCAUCAAAG |
| 2141 | modified | UACUGGCGCUUUAUCUCAUUACUUUGAGAGCCAUCACCAGCGACUAU |
| | CUUCGG, | GUCGUAUGGGUAAAGCGCUUAUUUAUCGGACUUCGGUCCGAUAAAUA |
| | minus U in 1st | AGAAGCAUCAAAG |
| | triplex | |
| 2142 | −1:4, +C4, | CGGCGCUUUUCUCGCAUUACUUUGAGAGCCAUCACCAGCGACUAUGU |
| | A14C, U17G, | CGUAUGGGUAAAGCGCUUAUUGUAUCGAGAGAUAAAUAAGAAGCAUC |
| | +G72, −76:78, | AAAG |
| | −83:87 | |
| 2143 | U1C, −73 | CACUGGCGCUUUUAUCUCAUUACUUUGAGAGCCAUCACCAGCGACUA |
| | | UGUCGUAUGGGUAAAGCGCUUAUUUUCGGAGAGAAAUCCGAUAAAUA |
| | | AGAAGCAUCAAAG |
| 2144 | Scaffold | UACUGGCGCUUUAUCUCAUUACUUUGAGAGCCAUCACCAGCGACUUC |
| | uuCG, stem | GGUCGUAUGGGUAAAGCGCUUAUGUAUCGGCUUCGGCCGAUACAUAA |
| | uuCG. Stem | GAAGCAUCAAAG |
| | swap, t | |
| | shorten | |
| 2145 | Scaffold | UACUGGCGCUUUUAUCUCAUUACUUUGAGAGCCAUCACCAGCGACUU |
| | uuCG, stem | CGGUCGUAUGGGUAAAGCGCUUAUGUAUCGGCUUCGGCCGAUACAUA |
| | uuCG. Stem | AGAAGCAUCAAAG |
| | swap | |
| 2146 | = +G60 | UACUGGCGCUUUUAUCUCAUUACUUUGAGAGCCAUCACCAGCGACUA |
| | | UGUCGUAUGGGUGAAAGCGCUUAUUUAUCGGAGAGAAAUCCGAUAAA |
| | | UAAGAAGCAUCAAAG |
| 2147 | no stem | UACUGGCGCUUUUAUCUCAUUACUUUGAGAGCCAUCACCAGCGACUU |
| | Scaffold | CGGUCGUAUGGGUAAAG |
| | uuCG | |
| 2148 | no stem | GAUGGGCUUUUAUCUCAUUACUUUGAGAGCCAUCACCAGCGACUUCG |
| | Scaffold | GUCGUAUGGGUAAAG |
| | uuCG, fun | |
| | start | |
| 2149 | Scaffold | GAUGGGCUUUUAUCUCAUUACUUUGAGAGCCAUCACCAGCGACUUCG |
| | uuCG, stem | GUCGUAUGGGUAAAGCGCUUAUUUAUCGGCUUCGGCCGAUAAAUAAG |
| | uuCG, fun | AAGCAUCAAAG |
| | start | |
| 2150 | Pseudoknots | UACUGGCGCUUUUAUCUCAUUACUUUGAGAGCCAUCACCAGCGACUA |
| | | UGUCGUAUGGGUAAAGCGCUACACUGGGAUCGCUGAAUUAGAGAUCG |
| | | GCGUCCUUUCAUUCUAUAUACUUUGGAGUUUUAAAAUGUCUCUAAGU |
| | | ACAGAAGCAUCAAAG |
| 2151 | Scaffold | GGCGCUUUUAUCUCAUUACUUUGAGAGCCAUCACCAGCGACUUCGGU |
| | uuCG, stem | CGUAUGGGUAAAGCGCUUAUUUAUCGGCUUCGGCCGAUAAAUAAGAA |
| | uuCG | GCAUCAAAG |
| 2152 | Scaffold | GCUGGCGCUUUUAUCUCAUUACUUUGAGAGCCAUCACCAGCGACUUC |
| | uuCG, stem | GGUCGUAUGGGUAAAGCGCUUAUUUAUCGGCUUCGGCCGAUAAAUAA |
| | uuCG, no start | GAAGCAUCAAAG |
| 2153 | Scaffold | UACUGGCGCUUUUAUCUCAUUACUUUGAGAGCCAUCACCAGCGACUU |
| | uuCG | CGGUCGUAUGGGUAAAGCGCUUAUUUAUCGGAGAGAAAUCCGAUAAA |
| | | UAAGAAGCAUCAAAG |
| 2154 | = +GCUC36 | UACUGGCGCUUUUAUCUCAUUACUUUGAGAGCCAUGCUCCACCAGCG |
| | | ACUAUGUCGUAUGGGUAAAGCGCUUAUUUAUCGGAGAGAAAUCCGAU |
| | | AAAUAAGAAGCAUCAAAG |
| 2155 | G quadriplex | UACUGGCGCUUUUAUCUCAUUACUUUGAGAGCCAUCACCAGCGACUA |
| | telomere | UGUCGUAUGGGUAAAGCGGGGUUAGGGUUAGGGUUAGGGAAGCAUCA |
| | basket + ends | AAG |
| 2156 | G quadriplex | UACUGGCGCUUUUAUCUCAUUACUUUGAGAGCCAUCACCAGCGACUA |
| | M3q | UGUCGUAUGGGUAAAGCGGAGGGAGGGAGGGAGAGGGAAAGCAUCAA |
| | | AG |
| 2157 | G quadriplex | UACUGGCGCUUUUAUCUCAUUACUUUGAGAGCCAUCACCAGCGACUA |
| | telomere | UGUCGUAUGGGUAAAGCGUUGGGUUAGGGUUAGGGUUAGGGAAAAGC |
| | basket no ends | AUCAAAG |
| 2158 | 45, 44 hairpin | UACUGGCGCUUUUAUCUCAUUACUUUGAGAGCCAUCACCAGCGACUA |
| | (old version) | UGUCGUAUGGGUAAAGCGC----------AGGGCUUCGGCCG----- |
| | | --GAAGCAUCAAAG |
| 2159 | Sarcin−ricin | UACUGGCGCUUUUAUCUCAUUACUUUGAGAGCCAUCACCAGCGACUA |
| | loop | UGUCGUAUGGGUAAAGCGCCUGCUCAGUACGAGAGGAACCGCAGGAA |
| | | GCAUCAAAG |
| 2160 | uvsX, C18G | UACUGGCGCUUUUAUCUGAUUACUUUGAGAGCCAUCACCAGCGACUA |
| | | UGUCGUAUGGGUAAAGCGCCCUCUUCGGAGGGAAGCAUCAAAG |
| 2161 | truncated stem | UACUGGCGCCUUUAUCUGAUUACUUUGAGAGCCAUCACCAGCGACUA |
| | loop, C18G, | UGUCGUAUGGGUAAAGCGCUUACGGACUUCGGUCCGUAAGAAGCAUC |
| | trip mut | AAAG |
| | (U10C) | |
| 2162 | short phage | UACUGGCGCUUUUAUCUGAUUACUUUGAGAGCCAUCACCAGCGACUA |
| | rep, C18G | UGUCGUAUGGGUAAAGCGCGGACGACCUCUCGGUCGUCCGAAGCAUC |
| | | AAAG |
| 2163 | phage rep | UACUGGCGCUUUUAUCUGAUUACUUUGAGAGCCAUCACCAGCGACUA |
| | loop, C18G | UGUCGUAUGGGUAAAGCGCAGGUGGGACGACCUCUCGGUCGUCCUAU |
| | | CUGAAGCAUCAAAG |
| 2164 | = +G18, | UACUGGCGCCUUUAUCUGCAUUACUUUGAGAGCCAUCACCAGCGACU |
| | stacked onto | AUGUCGUAUGGGUAAAGCGCUUACGGACUUCGGUCCGUAAGAAGCAU |
| | 64 | CAAAG |
| 2165 | truncated stem | GCUGGCGCUUUUAUCUGAUUACUUUGAGAGCCAUCACCAGCGACUAU |
| | loop, C18G, | GUCGUAUGGGUAAAGCGCUUACGGACUUCGGUCCGUAAGAAGCAUCA |
| | −1 A2G | AAG |
| 2166 | phage rep | UACUGGCGCCUUUAUCUGAUUACUUUGAGAGCCAUCACCAGCGACUA |
| | loop, C18G, | UGUCGUAUGGGUAAAGCGCAGGUGGGACGACCUCUCGGUCGUCCUAU |
| | trip mut | CUGAAGCAUCAAAG |
| | (U10C) | |
| 2167 | short phage | UACUGGCGCCUUUAUCUGAUUACUUUGAGAGCCAUCACCAGCGACUA |
| | rep, C18G, | UGUCGUAUGGGUAAAGCGCGGACGACCUCUCGGUCGUCCGAAGCAUC |
| | trip mut | AAAG |
| | (U10C) | |
| 2168 | uvsX, trip mut | UACUGGCGCCUUUAUCUCAUUACUUUGAGAGCCAUCACCAGCGACUA |
| | (U10C) | UGUCGUAUGGGUAAAGCGCCCUCUUCGGAGGGAAGCAUCAAAG |
| 2169 | truncated stem | UACUGGCGCUUUUAUCUCAUUACUUUGAGAGCCAUCACCAGCGACUA |
| | loop | UGUCGUAUGGGUAAAGCGCUUACGGACUUCGGUCCGUAAGAAGCAUC |
| | | AAAG |
| 2170 | = +A17, | UACUGGCGCCUUUAUCAUCAUUACUUUGAGAGCCAUCACCAGCGACU |
| | stacked onto | AUGUCGUAUGGGUAAAGCGCUUACGGACUUCGGUCCGUAAGAAGCAU |
| | 64 | CAAAG |
| 2171 | 3′ HDV | UACUGGCGCUUUUAUCUCAUUACUUUGAGAGCCAUCACCAGCGACUA |
| | genomic | UGUCGUAUGGGUAAAGCGCUUAUUUAUCGGAGAGAAAUCCGAUAAAU |
| | ribozyme | AAGAAGCAUCAAAGGGCCGGCAUGGUCCCAGCCUCCUCGCUGGCGCC |
| | | GGCUGGGCAACAUUCCGAGGGGACCGUCCCCUCGGUAAUGGCGAAUG |
| | | GGACCC |
| 2172 | phage rep | UACUGGCGCCUUUAUCUCAUUACUUUGAGAGCCAUCACCAGCGACUA |
| | loop, trip mut | UGUCGUAUGGGUAAAGCGCAGGUGGGACGACCUCUCGGUCGUCCUAU |
| | (U10C) | CUGAAGCAUCAAAG |
| 2173 | −79:80 | UACUGGCGCUUUUAUCUCAUUACUUUGAGAGCCAUCACCAGCGACUA |
| | | UGUCGUAUGGGUAAAGCGCUUAUUUAUCGGAGAAAUCCGAUAAAUAA |
| | | GAAGCAUCAAAG |
| 2174 | short phage | UACUGGCGCCUUUAUCUCAUUACUUUGAGAGCCAUCACCAGCGACUA |
| | rep, trip mut | UGUCGUAUGGGUAAAGCGCGGACGACCUCUCGGUCGUCCGAAGCAUC |
| | (U10C) | AAAG |
| 2175 | extra | UACUGGCGCUUUUAUCUCAUUACUUUGAGAGCCAUCACCAGCGACUA |
| | truncated stem | UGUCGUAUGGGUAAAGCGCCGGACUUCGGUCCGGAAGCAUCAAAG |
| | loop | |
| 2176 | U17G, C18G | UACUGGCGCUUUUAUCGGAUUACUUUGAGAGCCAUCACCAGCGACUA |
| | | UGUCGUAUGGGUAAAGCGCUUAUUUAUCGGAGAGAAAUCCGAUAAAU |
| | | AAGAAGCAUCAAAG |
| 2177 | short phage | UACUGGCGCUUUUAUCUCAUUACUUUGAGAGCCAUCACCAGCGACUA |
| | rep | UGUCGUAUGGGUAAAGCGCGGACGACCUCUCGGUCGUCCGAAGCAUC |
| | | AAAG |
| 2178 | uvsX, C18G, | GCUGGCGCUUUUAUCUGAUUACUUUGAGAGCCAUCACCAGCGACUAU |
| | −1 A2G | GUCGUAUGGGUAAAGCGCCCUCUUCGGAGGGAAGCAUCAAAG |
| 2179 | uvsX, C18G, | GCUGGCGCCUUUAUCUGAUUACUUUGAGAGCCAUCACCAGCGACUAU |
| | trip mut | GUCGUAUGGGUAAAGCUCCCUCUUCGGAGGGAGCAUCAAAG |
| | (U10C), −1 | |
| | A2G, HDV | |
| | −99 G65U | |
| 2180 | 3′ HDV | UACUGGCGCUUUUAUCUCAUUACUUUGAGAGCCAUCACCAGCGACUA |
| | antigenomic | UGUCGUAUGGGUAAAGCGCUUAUUUAUCGGAGAGAAAUCCGAUAAAU |
| | ribozyme | AAGAAGCAUCAAAGGGGUCGGCAUGGCAUCUCCACCUCCUCGCGGUC |
| | | CGACCUGGGCAUCCGAAGGAGGACGCACGUCCACUCGGAUGGCUAAG |
| | | GGAGAGCCA |
| 2181 | uvsX, C18G, | GCUGGCGCCUUUAUCUGAUUACUUUGAGAGCCAUCACCAGCGACUAU |
| | trip mut | GUCGUAUGGGUAAAGCGCCCUCUUCGGAGGGCGCAUCAAAG |
| | (U10C), −1 | |
| | A2G, HDV | |
| | AA(98:99)C | |
| 2182 | 3′ HDV | UACUGGCGCUUUUAUCUCAUUACUUUGAGAGCCAUCACCAGCGACUA |
| | ribozyme | UGUCGUAUGGGUAAAGCGCUUAUUUAUCGGAGAGAAAUCCGAUAAAU |
| | (Lior Nissim, | AAGAAGCAUCAAAGUUUUGGCCGGCAUGGUCCCAGCCUCCUCGCUGG |
| | Timothy Lu) | CGCCGGCUGGGCAACAUGCUUCGGCAUGGCGAAUGGGACCCCGGG |
| 2183 | TAC(1:3)GA, | GAUGGCGCCUUUAUCUCAUUACUUUGAGAGCCAUCACCAGCGACUAU |
| | stacked onto | GUCGUAUGGGUAAAGCGCUUACGGACUUCGGUCCGUAAGAAGCAUCA |
| | 64 | AAG |
| 2184 | uvsX, −1 A2G | GCUGGCGCUUUUAUCUCAUUACUUUGAGAGCCAUCACCAGCGACUAU |
| | | GUCGUAUGGGUAAAGCGCCCUCUUCGGAGGGAAGCAUCAAAG |
| 2185 | truncated stem | GCUGGCGCCUUUAUCUGAUUACUUUGAGAGCCAUCACCAGCGACUAU |
| | loop, C18G, | GUCGUAUGGGUAAAGCUCUUACGGACUUCGGUCCGUAAGAGCAUCAA |
| | trip mut | AG |
| | (U10C), −1 | |
| | A2G, HDV | |
| | −99 G65U | |
| 2186 | short phage | GCUGGCGCCUUUAUCUGAUUACUUUGAGAGCCAUCACCAGCGACUAU |
| | rep, C18G, | GUCGUAUGGGUAAAGCUCGGACGACCUCUCGGUCGUCCGAGCAUCAA |
| | trip mut | AG |
| | (U10C), −1 | |
| | A2G, HDV − | |
| | 99 G65U | |
| 2187 | 3′ sTRSV WT | UACUGGCGCUUUUAUCUCAUUACUUUGAGAGCCAUCACCAGCGACUA |
| | viral | UGUCGUAUGGGUAAAGCGCUUAUUUAUCGGAGAGAAAUCCGAUAAAU |
| | Hammerhead | AAGAAGCAUCAAAGCCUGUCACCGGAUGUGCUUUCCGGUCUGAUGAG |
| | ribozyme | UCCGUGAGGACGAAACAGG |
| 2188 | short phage | GCUGGCGCUUUUAUCUGAUUACUUUGAGAGCCAUCACCAGCGACUAU |
| | rep, C18G, −1 | GUCGUAUGGGUAAAGCGCGGACGACCUCUCGGUCGUCCGAAGCAUCA |
| | A2G | AAG |
| 2189 | short phage | GCUGGCGCCUUUAUCUGAUUACUUUGAGAGCCAUCACCAGCGACUAU |
| | rep, C18G, | GUCGUAUGGGUAAAGCGCGGACGACCUCUCGGUCGUCCGAAGCAUCA |
| | trip mut | AAG |
| | (U10C), −1 | |
| | A2G, 3′ | |
| | genomic HDV | |
| 2190 | phage rep | GCUGGCGCCUUUAUCUGAUUACUUUGAGAGCCAUCACCAGCGACUAU |
| | loop, C18G, | GUCGUAUGGGUAAAGCUCAGGUGGGACGACCUCUCGGUCGUCCUAUC |
| | trip mut | UGAGCAUCAAAG |
| | (U10C), −1 | |
| | A2G, HDV | |
| | −99 G65U | |
| 2191 | 3′ HDV | UACUGGCGCUUUUAUCUCAUUACUUUGAGAGCCAUCACCAGCGACUA |
| | ribozyme | UGUCGUAUGGGUAAAGCGCUUAUUUAUCGGAGAGAAAUCCGAUAAAU |
| | (Owen Ryan, | AAGAAGCAUCAAAGGAUGGCCGGCAUGGUCCCAGCCUCCUCGCUGGC |
| | Jamie Cate) | GCCGGCUGGGCAACACCUUCGGGUGGCGAAUGGGAC |
| 2192 | phage rep | GCUGGCGCUUUUAUCUGAUUACUUUGAGAGCCAUCACCAGCGACUAU |
| | loop, C18G, | GUCGUAUGGGUAAAGCGCAGGUGGGACGACCUCUCGGUCGUCCUAUC |
| | −1 A2G | UGAAGCAUCAAAG |
| 2193 | 0.14 | UACUGGCGCUUUUAUCUCAUUACUUUGAGAGCCAUCACCAGCGACUA |
| | | UGUCGUACUGGGUAAAGCGCUUAUUUAUCGGAGAGAAAUCCGAUAAA |
| | | UAAGAAGCAUCAAAG |
| 2194 | −78, G77U | UACUGGCGCUUUUAUCUCAUUACUUUGAGAGCCAUCACCAGCGACUA |
| | | UGUCGUAUGGGUAAAGCGCUUAUUUAUCGUGAGAAAUCCGAUAAAUA |
| | | AGAAGCAUCAAAG |
| 2195 | | GUACUGGCGCUUUUAUCUCAUUACUUUGAGAGCCAUCACCAGCGACU |
| | | AUGUCGUAUGGGUAAAGCGCUUAUUUAUCGGAGAGAAAUCCGAUAAA |
| | | UAAGAAGCAUCAAAG |
| 2196 | short phage | GCUGGCGCUUUUAUCUCAUUACUUUGAGAGCCAUCACCAGCGACUAU |
| | rep, −1 A2G | GUCGUAUGGGUAAAGCGCGGACGACCUCUCGGUCGUCCGAAGCAUCA |
| | | AAG |
| 2197 | truncated stem | GCUGGCGCCUUUAUCUGAUUACUUUGAGAGCCAUCACCAGCGACUAU |
| | loop, C18G, | GUCGUAUGGGUAAAGCGCUUACGGACUUCGGUCCGUAAGAAGCAUCA |
| | trip mut | AAG |
| | (U10C), −1 | |
| | A2G | |
| 2198 | −1, A2G | GCUGGCGCUUUUAUCUCAUUACUUUGAGAGCCAUCACCAGCGACUAU |
| | | GUCGUAUGGGUAAAGCGCUUAUUUAUCGGAGAGAAAUCCGAUAAAUA |
| | | AGAAGCAUCAAAG |
| 2199 | truncated stem | GCUGGCGCCUUUAUCUCAUUACUUUGAGAGCCAUCACCAGCGACUAU |
| | loop, trip mut | GUCGUAUGGGUAAAGCGCUUACGGACUUCGGUCCGUAAGAAGCAUCA |
| | (U10C), −1 | AAG |
| | A2G | |
| 2200 | uvsX, C18G, | GCUGGCGCCUUUAUCUGAUUACUUUGAGAGCCAUCACCAGCGACUAU |
| | trip mut | GUCGUAUGGGUAAAGCGCCCUCUUCGGAGGGAAGCAUCAAAG |
| | (U10C), −1 | |
| | A2G | |
| 2201 | phage rep | GCUGGCGCUUUUAUCUCAUUACUUUGAGAGCCAUCACCAGCGACUAU |
| | loop, −1 A2G | GUCGUAUGGGUAAAGCGCAGGUGGGACGACCUCUCGGUCGUCCUAUC |
| | | UGAAGCAUCAAAG |
| 2202 | phage rep | GCUGGCGCCUUUAUCUCAUUACUUUGAGAGCCAUCACCAGCGACUAU |
| | loop, trip mut | GUCGUAUGGGUAAAGCGCAGGUGGGACGACCUCUCGGUCGUCCUAUC |
| | (U10C), −1 | UGAAGCAUCAAAG |
| | A2G | |
| 2203 | phage rep | GCUGGCGCCUUUAUCUGAUUACUUUGAGAGCCAUCACCAGCGACUAU |
| | loop, C18G, | GUCGUAUGGGUAAAGCGCAGGUGGGACGACCUCUCGGUCGUCCUAUC |
| | trip mut | UGAAGCAUCAAAG |
| | (U10C), −1 | |
| | A2G | |
| 2204 | truncated stem | UACUGGCGCUUUUAUCUGAUUACUUUGAGAGCCAUCACCAGCGACUA |
| | loop, C18G | UGUCGUAUGGGUAAAGCGCUUACGGACUUCGGUCCGUAAGAAGCAUC |
| | | AAAG |
| 2205 | uvsX, trip mut | GCUGGCGCCUUUAUCUCAUUACUUUGAGAGCCAUCACCAGCGACUAU |
| | (U10C), −1 | GUCGUAUGGGUAAAGCGCCCUCUUCGGAGGGAAGCAUCAAAG |
| | A2G | |
| 2206 | truncated stem | GCUGGCGCUUUUAUCUCAUUACUUUGAGAGCCAUCACCAGCGACUAU |
| | loop, −1 A2G | GUCGUAUGGGUAAAGCGCUUACGGACUUCGGUCCGUAAGAAGCAUCA |
| | | AAG |
| 2207 | short phage | GCUGGCGCCUUUAUCUCAUUACUUUGAGAGCCAUCACCAGCGACUAU |
| | rep, trip mut | GUCGUAUGGGUAAAGCGCGGACGACCUCUCGGUCGUCCGAAGCAUCA |
| | (U10C), −1 | AAG |
| | A2G | |
| 2208 | 5′ HDV | GAUGGCCGGCAUGGUCCCAGCCUCCUCGCUGGCGCCGGCUGGGCAAC |
| | ribozyme | ACCUUCGGGUGGCGAAUGGGACUACUGGCGCUUUUAUCUCAUUACUU |
| | (Owen Ryan, | UGAGAGCCAUCACCAGCGACUAUGUCGUAUGGGUAAAGCGCUUAUUU |
| | Jamie Cate) | AUGGGAGAGAAAUCCGAUAAAUAAGAAGCAUCAAAG |
| 2209 | 5′ HDV | GGCCGGCAUGGUCCCAGCCUCCUCGCUGGCGCCGGCUGGGCAACAUU |
| | genomic | CCGAGGGGACCGUCCCCUCGGUAAUGGCGAAUGGGACCCUACUGGCG |
| | ribozyme | CUUUUAUCUCAUUACUUUGAGAGCCAUCACCAGCGACUAUGUCGUAU |
| | | GGGUAAAGCGCUUAUUUAUCGGAGAGAAAUCCGAUAAAUAAGAAGCA |
| | | UCAAAG |
| 2210 | truncated stem | GCUGGCGCCUUUAUCUGAUUACUUUGAGAGCCAUCACCAGCGACUAU |
| | loop, C18G, | GUCGUAUGGGUAAAGCGCUUACGGACUUCGGUCCGUAAGCGCAUCAA |
| | trip mut | AG |
| | (U10C), −1 | |
| | A2G, HDV | |
| | AA(98:99)C | |
| 2211 | 5′ env25 pistol | CGUGGUUAGGGCCACGUUAAAUAGUUGCUUAAGCCCUAAGCGUUGAU |
| | ribozyme | CUUCGGAUCAGGUGCAAUACUGGCGCUUUUAUCUCAUUACUUUGAGA |
| | (with an added | GCCAUCACCAGCGACUAUGUCGUAUGGGUAAAGCGCUUAUUUAUCGG |
| | CUUCGG | AGAGAAAUCCGAUAAAUAAGAAGCAUCAAAG |
| | loop) | |
| 2212 | 5′ HDV | GGGUCGGCAUGGCAUCUCCACCUCCUCGCGGUCCGACCUGGGCAUCC |
| | antigenomic | GAAGGAGGACGCACGUCCACUCGGAUGGCUAAGGGAGAGCCAUACUG |
| | ribozyme | GCGCUUUUAUCUCAUUACUUUGAGAGCCAUCACCAGCGACUAUGUCG |
| | | UAUGGGUAAAGCGCUUAUUUAUCGGAGAGAAAUCCGAUAAAUAAGAA |
| | | GCAUCAAAG |
| 2213 | 3′ | UACUGGCGCUUUUAUCUCAUUACUUUGAGAGCCAUCACCAGCGACUA |
| | Hammerhead | UGUCGUAUGGGUAAAGCGCUUAUUUAUCGGAGAGAAAUCCGAUAAAU |
| | ribozyme | AAGAAGCAUCAAAGCCAGUACUGAUGAGUCCGUGAGGACGAAACGAG |
| | (Lior Nissim, | UAAGCUCGUCUACUGGCGCUUUUAUCUCAU |
| | Timothy Lu) | |
| | guide scaffold | |
| | scar | |
| 2214 | = +A27, | UACUGGCGCCUUUAUCUCAUUACUUUAGAGAGCCAUCACCAGCGACU |
| | stacked onto | AUGUCGUAUGGGUAAAGCGCUUACGGACUUCGGUCCGUAAGAAGCAU |
| | 64 | CAAAG |
| 2215 | 5′ Hammerhea | CGACUACUGAUGAGUCCGUGAGGACGAAACGAGUAAGCUCGUCUAGU |
| | d ribozyme | CGUACUGGCGCUUUUAUCUCAUUACUUUGAGAGCCAUCACCAGCGAC |
| | (Lior Nissim, | UAUGUCGUAUGGGUAAAGCGCUUAUUUAUCGGAGAGAAAUCCGAUAA |
| | Timothy Lu) | AUAAGAAGCAUCAAAG |
| | smaller scar | |
| 2216 | phage rep | GCUGGCGCCUUUAUCUGAUUACUUUGAGAGCCAUCACCAGCGACUAU |
| | loop, C18G, | GUCGUAUGGGUAAAGCGCAGGUGGGACGACCUCUCGGUCGUCCUAUC |
| | trip mut | UGCGCAUCAAAG |
| | (U10C), −1 | |
| | A2G, HDV | |
| | AA(98:99)C | |
| 2217 | −27, stacked | UACUGGCGCCUUUAUCUCAUUACUUUAGAGCCAUCACCAGCGACUAU |
| | onto 64 | GUCGUAUGGGUAAAGCGCUUACGGACUUCGGUCCGUAAGAAGCAUCA |
| | | AAG |
| 2218 | 3′ Hatchet | UACUGGCGCUUUUAUCUCAUUACUUUGAGAGCCAUCACCAGCGACUA |
| | | UGUCGUAUGGGUAAAGCGCUUAUUUAUCGGAGAGAAAUCCGAUAAAU |
| | | AAGAAGCAUCAAAGCAUUCCUCAGAAAAUGACAAACCUGUGGGGCGU |
| | | AAGUAGAUCUUCGGAUCUAUGAUCGUGCAGACGUUAAAAUCAGGU |
| 2219 | 3′ | UACUGGCGCUUUUAUCUCAUUACUUUGAGAGCCAUCACCAGCGACUA |
| | Hammerhead | UGUCGUAUGGGUAAAGCGCUUAUUUAUCGGAGAGAAAUCCGAUAAAU |
| | ribozyme | AAGAAGCAUCAAAGCGACUACUGAUGAGUCCGUGAGGACGAAACGAG |
| | (Lior Nissim, | UAAGCUCGUCUAGUCGCGUGUAGCGAAGCA |
| | Timothy Lu) | |
| 2220 | 5′ Hatchet | CAUUCCUCAGAAAAUGACAAACCUGUGGGGCGUAAGUAGAUCUUCGG |
| | | AUCUAUGAUCGUGCAGACGUUAAAAUCAGGUUACUGGCGCUUUUAUC |
| | | UCAUUACUUUGAGAGCCAUCACCAGCGACUAUGUCGUAUGGGUAAAG |
| | | CGCUUAUUUAUCGGAGAGAAAUCCGAUAAAUAAGAAGCAUCAAAG |
| 2221 | 5′ HDV | UUUUGGCCGGCAUGGUCCCAGCCUCCUCGCUGGCGCCGGCUGGGCAA |
| | ribozyme | CAUGCUUCGGCAUGGCGAAUGGGACCCCGGGUACUGGCGCUUUUAUC |
| | (Lior Nissim, | UCAUUACUUUGAGAGCCAUCACCAGCGACUAUGUCGUAUGGGUAAAG |
| | Timothy Lu) | CGCUUAUUUAUCGGAGAGAAAUCCGAUAAAUAAGAAGCAUCAAAG |
| 2222 | 5′ | CGACUACUGAUGAGUCCGUGAGGACGAAACGAGUAAGCUCGUCUAGU |
| | Hammerhead | CGCGUGUAGCGAAGCAUACUGGCGCUUUUAUCUCAUUACUUUGAGAG |
| | ribozyme | CCAUCACCAGCGACUAUGUCGUAUGGGUAAAGCGCUUAUUUAUCGGA |
| | (Lior Nissim, | GAGAAAUCCGAUAAAUAAGAAGCAUCAAAG |
| | Timothy Lu) | |
| 2223 | 3′ HH15 | UACUGGCGCUUUUAUCUCAUUACUUUGAGAGCCAUCACCAGCGACUA |
| | Minimal | UGUCGUAUGGGUAAAGCGCUUAUUUAUCGGAGAGAAAUCCGAUAAAU |
| | Hammerhead | AAGAAGCAUCAAAGGGGAGCCCCGCUGAUGAGGUCGGGGAGACCGAA |
| | ribozyme | AGGGACUUCGGUCCCUACGGGGCUCCC |
| 2224 | 5′ RBMX | CCACCCCCACCACCACCCCCACCCCCACCACCACCCUACUGGCGCUU |
| | recruiting | UUAUCUCAUUACUUUGAGAGCCAUCACCAGCGACUAUGUCGUAUGGG |
| | motif | UAAAGCGCUUAUUUAUCGGAGAGAAAUCCGAUAAAUAAGAAGCAUCA |
| | | AAG |
| 2225 | 3′ | UACUGGCGCUUUUAUCUCAUUACUUUGAGAGCCAUCACCAGCGACUA |
| | Hammerhead | UGUCGUAUGGGUAAAGCGCUUAUUUAUCGGAGAGAAAUCCGAUAAAU |
| | ribozyme | AAGAAGCAUCAAAGCGACUACUGAUGAGUCCGUGAGGACGAAACGAG |
| | (Lior Nissim, | UAAGCUCGUCUAGUCG |
| | Timothy Lu) | |
| | smaller scar | |
| 2226 | 3′ env25 pistol | UACUGGCGCUUUUAUCUCAUUACUUUGAGAGCCAUCACCAGCGACUA |
| | ribozyme | UGUCGUAUGGGUAAAGCGCUUAUUUAUCGGAGAGAAAUCCGAUAAAU |
| | (with an added | AAGAAGCAUCAAAGCGUGGUUAGGGCCACGUUAAAUAGUUGCUUAAG |
| | CUUCGG | CCCUAAGCGUUGAUCUUCGGAUCAGGUGCAA |
| | loop) | |
| 2227 | 3′ Env−9 | UACUGGCGCUUUUAUCUCAUUACUUUGAGAGCCAUCACCAGCGACUA |
| | Twister | UGUCGUAUGGGUAAAGCGCUUAUUUAUCGGAGAGAAAUCCGAUAAAU |
| | | AAGAAGCAUCAAAGGGCAAUAAAGCGGUUACAAGCCCGCAAAAAUAG |
| | | CAGAGUAAUGUCGCGAUAGCGCGGCAUUAAUGCAGCUUUAUUG |
| 2228 | = +AUUAUC | UACUGGCGCUUUUAUCUCAUUACUAUUAUCUCAUUACUUUGAGAGCC |
| | UCAUUACU | AUCACCAGCGACUAUGUCGUAUGGGUAAAGCGCUUAUUUAUCGGAGA |
| | 25 | GAAAUCCGAUAAAUAAGAAGCAUCAAAG |
| 2229 | 5′ Env−9 | GGCAAUAAAGCGGUUACAAGCCCGCAAAAAUAGCAGAGUAAUGUCGC |
| | Twister | GAUAGCGCGGCAUUAAUGCAGCUUUAUUGUACUGGCGCUUUUAUCUC |
| | | AUUACUUUGAGAGCCAUCACCAGCGACUAUGUCGUAUGGGUAAAGCG |
| | | CUUAUUUAUCGGAGAGAAAUCCGAUAAAUAAGAAGCAUCAAAG |
| 2230 | 3′ Twisted | UACUGGCGCUUUUAUCUCAUUACUUUGAGAGCCAUCACCAGCGACUA |
| | Sister 1 | UGUCGUAUGGGUAAAGCGCUUAUUUAUCGGAGAGAAAUCCGAUAAAU |
| | | AAGAAGCAUCAAAGACCCGCAAGGCCGACGGCAUCCGCCGCCGCUGG |
| | | UGCAAGUCCAGCCGCCCCUUCGGGGGCGGGCGCUCAUGGGUAAC |
| 2231 | no stem | UACUGGCGCUUUUAUCUCAUUACUUUGAGAGCCAUCACCAGCGACUA |
| | | UGUCGUAUGGGUAAAG |
| 2232 | 5′ HH15 | GGGAGCCCCGCUGAUGAGGUCGGGGAGACCGAAAGGGACUUCGGUCC |
| | Minimal | CUACGGGGCUCCCUACUGGCGCUUUUAUCUCAUUACUUUGAGAGCCA |
| | Hammerhead | UCACCAGCGACUAUGUCGUAUGGGUAAAGCGCUUAUUUAUCGGAGAG |
| | ribozyme | AAAUCCGAUAAAUAAGAAGCAUCAAAG |
| 2233 | 5′ | CCAGUACUGAUGAGUCCGUGAGGACGAAACGAGUAAGCUCGUCUACU |
| | Hammerhead | GGCGCUUUUAUCUCAUUACUGGCGCUUUUAUCUCAUUACUUUGAGAG |
| | ribozyme | CCAUCACCAGCGACUAUGUCGUAUGGGUAAAGCGCUUAUUUAUCGGA |
| | (Lior Nissim, | GAGAAAUCCGAUAAAUAAGAAGCAUCAAAG |
| | Timothy Lu) | |
| | guide scaffold | |
| | scar | |
| 2234 | 5′ Twisted | ACCCGCAAGGCCGACGGCAUCCGCCGCCGCUGGUGCAAGUCCAGCCG |
| | Sister 1 | CCCCUUCGGGGGCGGGCGCUCAUGGGUAACUACUGGCGCUUUUAUCU |
| | | CAUUACUUUGAGAGCCAUCACCAGCGACUAUGUCGUAUGGGUAAAGC |
| | | GCUUAUUUAUCGGAGAGAAAUCCGAUAAAUAAGAAGCAUCAAAG |
| 2235 | 5′ sTRSV WT | CCUGUCACCGGAUGUGCUUUCCGGUCUGAUGAGUCCGUGAGGACGAA |
| | viral | ACAGGUACUGGCGCUUUUAUCUCAUUACUUUGAGAGCCAUCACCAGC |
| | Hammerhead | GACUAUGUCGUAUGGGUAAAGCGCUUAUUUAUCGGAGAGAAAUCCGA |
| | ribozyme | UAAAUAAGAAGCAUCAAAG |
| 2236 | 148:= +G55, | GUACUGGCGCCUUUAUCUCAUUACUUUGAGAGCCAUCACCAGCGACU |
| | stacked onto | AUGUCGUAGUGGGUAAAGCGCUUACGGACUUCGGUCCGUAAGAAGCA |
| | 64 | UCAAAG |
| 2237 | 158: | GUACUGGCGCUUUUAUCUGAUUACUUUGAGAGCCAUCACCAGCGACU |
| | 103 + 148(+G5 | AUGUCGUAGUGGGUAAAGCUCCCUCUUCGGAGGGAGCAUCAAAG |
| | 5) −99, G65U | |
| 2238 | 174:Uvsx | ACUGGCGCUUUUAUCUGAUUACUUUGAGAGCCAUCACCAGCGACUAU |
| | Extended stem | GUCGUAGUGGGUAAAGCUCCCUCUUCGGAGGGAGCAUCAAAG |
| | with [A99] | |
| | G65U), | |
| | C18G, \hat{ }G55, | |
| | [GU−1] | |
| 2239 | 175:extended | ACUGGCGCCUUUAUCUCAUUACUUUGAGAGCCAUCACCAGCGACUAU |
| | stem | GUCGUAUGGGUAAAGCGCUUACGGACUUCGGUCCGUAAGAAGCAUCA |
| | truncation, | AAG |
| | U10C, [GU−1] | |
| 2240 | 176:174 with | GCUGGCGCUUUUAUCUGAUUACUUUGAGAGCCAUCACCAGCGACUAU |
| | AIG | GUCGUAGUGGGUAAAGCUCCCUCUUCGGAGGGAGCAUCAAAG |
| | substitution | |
| | for T7 | |
| | transcription | |
| 2241 | 177:174 with | ACUGGCGCUUUUAUCUGAUUACUUUGAGAGCCAUCACCAGCGACUAU |
| | bubble (+G55) | GUCGUAUGGGUAAAGCUCCCUCUUCGGAGGGAGCAUCAAAG |
| | removed | |
| 2242 | 181:stem 42 | ACUGGCGCCUUUAUCUGAUUACUUUGAGAGCCAUCACCAGCGACUAU |
| | (truncated | GUCGUAUGGGUAAAGCGCUUACGGACUUCGGUCCGUAAGAAGCAUCA |
| | stem loop); | AAG |
| | U10C, C18G, | |
| | [GU−1] | |
| | (95 + [GU−1]) | |
| 2243 | 182:stem 42 | ACUGGCGCUUUUAUCUGAUUACUUUGAGAGCCAUCACCAGCGACUAU |
| | (truncated | GUCGUAUGGGUAAAGCGCUUACGGACUUCGGUCCGUAAGAAGCAUCA |
| | stem loop); | AAG |
| | C18G, [GU−1] | |
| 2244 | 183:stem 42 | ACUGGCGCUUUUAUCUGAUUACUUUGAGAGCCAUCACCAGCGACUAU |
| | (truncated | GUCGUAGUGGGUAAAGCGCUUACGGACUUCGGUCCGUAAGAAGCAUC |
| | stem loop); | AAAG |
| | C18G,\hat{ }G55, | |
| | [GU−1] | |
| 2245 | 184:stem 48 | ACUGGCGCUUUUAUCUGAUUACUUUGAGAGCCAUCACCAGCGACUAU |
| | (uvsx, −99 | GUCGUAUUGGGUAAAGCUCCCUCUUCGGAGGGAGCAUCAAAG |
| | g65t); | |
| | C18G,\hat{ }T55, | |
| | [GU−1] | |
| 2246 | 185:stem 42 | ACUGGCGCUUUUAUCUGAUUACUUUGAGAGCCAUCACCAGCGACUAU |
| | (truncated | GUCGUAUUGGGUAAAGCGCUUACGGACUUCGGUCCGUAAGAAGCAUC |
| | stem loop); | AAAG |
| | C18G,\hat{ }U55, | |
| | [GU−1] | |
| 2247 | 186:stem 42 | ACUGGCGCCUUUAUCAUCAUUACUUUGAGAGCCAUCACCAGCGACUA |
| | (truncated | UGUCGUAUGGGUAAAGCGCUUACGGACUUCGGUCCGUAAGAAGCAUC |
| | stem loop); | AAAG |
| | U10C ,\hat{ }A17, | |
| | [GU−1] | |
| 2248 | 187:stem 46 | ACUGGCGCUUUUAUCUGAUUACUUUGAGAGCCAUCACCAGCGACUAU |
| | (uvsx); | GUCGUAGUGGGUAAAGCGCCCUCUUCGGAGGGAAGCAUCAAAG |
| | C18G,\hat{ }G55, | |
| | [GU−1] | |
| 2249 | 188:stem 50 | ACUGGCGCUUUUAUCUGAUUACUUUGAGAGCCAUCACCAGCGACUAU |
| | (ms2U15C, | GUCGUAGUGGGUAAAGCUCACAUGAGGAUCACCCAUGUGAGCAUCAA |
| | −99, g65t); | AG |
| | C18G,\hat{ }G55, | |
| | [GU−1] | |
| 2250 | 189:174 + | ACUGGCACUUUUACCUGAUUACUUUGAGAGCCAACACCAGCGACUAU |
| | G8A; U15C; | GUCGUAGUGGGUAAAGCUCCCUCUUCGGAGGGAGCAUCAAAG |
| | U35A | |
| 2251 | 190:174 + | ACUGGCACUUUUAUCUGAUUACUUUGAGAGCCAUCACCAGCGACUAU |
| | G8A | GUCGUAGUGGGUAAAGCUCCCUCUUCGGAGGGAGCAUCAAAG |
| 2252 | 191:174 + | ACUGGCCCUUUUAUCUGAUUACUUUGAGAGCCAUCACCAGCGACUAU |
| | G8C | GUCGUAGUGGGUAAAGCUCCCUCUUCGGAGGGAGCAUCAAAG |
| 2253 | 192:174 + | ACUGGCGCUUUUACCUGAUUACUUUGAGAGCCAUCACCAGCGACUAU |
| | U15C | GUCGUAGUGGGUAAAGCUCCCUCUUCGGAGGGAGCAUCAAAG |
| 2254 | 193, 174 + | ACUGGCGCUUUUAUCUGAUUACUUUGAGAGCCAACACCAGCGACUAU |
| | U35A | GUCGUAGUGGGUAAAGCUCCCUCUUCGGAGGGAGCAUCAAAG |
| 2255 | 195:175 + | ACUGGCACCUUUACCUGAUUACUUUGAGAGCCAACACCAGGGACUAU |
| | C18G + | GUCGUAUGGGUAAAGCGCUUACGGACUUCGGUCCGUAAGAAGCAUCA |
| | G8A; U15C; | AAG |
| | U35A | |
| 2256 | 196:175 + | ACUGGCACCUUUAUCUGAUUACUUUGAGAGCCAUCACCAGCGACUAU |
| | C18G + G8A | GUCGUAUGGGUAAAGCGCUUACGGACUUCGGUCCGUAAGAAGCAUCA |
| | | AAG |
| 2257 | 197:175 + | ACUGGCCCCUUUAUCUGAUUACUUUGAGAGCCAUCACCAGCGACUAU |
| | C18G + G8C | GUCGUAUGGGUAAAGCGCUUACGGACUUCGGUCCGUAAGAAGCAUCA |
| | | AAG |
| 2258 | 198:175 + | ACUGGCGCCUUUAUCUGAUUACUUUGAGAGCCAACACCAGCGACUAU |
| | C18G + U35A | GUCGUAUGGGUAAAGCGCUUACGGACUUCGGUCCGUAAGAAGCAUCA |
| | | AAG |
| 2259 | 199:174 + | GCUGGCGCUUUUAUCUGAUUACUUUGAGAGCCAUCACCAGCGACUAU |
| | A2G (test G | GUCGUAGUGGGUAAAGCUCCCUCUUCGGAGGGAGCAUCAAAG |
| | transcription | |
| | at start; | |
| | ccGCT...) | |
| 2260 | 200:174 + | GACUGGCGCUUUUAUCUGAUUACUUUGAGAGCCAUCACCAGCGACUA |
| | \hat{ }G1 | UGUCGUAGUGGGUAAAGCUCCCUCUUCGGAGGGAGCAUCAAAG |
| | (ccGACU...) | |
| 2261 | 201:174 + | ACUGGCGCCUUUAUCUGAUUACUUUGGAGAGCCAUCACCAGCGACUA |
| | U10C; \hat{ }G28 | UGUCGUAGUGGGUAAAGCUCCCUCUUCGGAGGGAGCAUCAAAG |
| 2262 | 202:174 + | ACUGGCGCAUUUAUCUGAUUACUUUGUGAGCCAUCACCAGCGACUAU |
| | U10A; A28U | GUCGUAGUGGGUAAAGCUCCCUCUUCGGAGGGAGCAUCAAAG |
| 2263 | 203:174 + | ACUGGCGCCUUUAUCUGAUUACUUUGAGAGCCAUCACCAGCGACUAU |
| | U10C | GUCGUAGUGGGUAAAGCUCCCUCUUCGGAGGGAGCAUCAAAG |
| 2264 | 204:174 + | ACUGGCGCUUUUAUCUGAUUACUUUGGAGAGCCAUCACCAGCGACUA |
| | \hat{ }G28 | UGUCGUAGUGGGUAAAGCUCCCUCUUCGGAGGGAGCAUCAAAG |
| 2265 | 205:174 + | ACUGGCGCAUUUAUCUGAUUACUUUGAGAGCCAUCACCAGCGACUAU |
| | U10A | GUCGUAGUGGGUAAAGCUCCCUCUUCGGAGGGAGCAUCAAAG |
| 2266 | 206, 174 + | ACUGGCGCUUUUAUCUGAUUACUUUGUGAGCCAUCACCAGCGACUAU |
| | A28U | GUCGUAGUGGGUAAAGCUCCCUCUUCGGAGGGAGCAUCAAAG |
| 2267 | 207:174 + | ACUGGCGCUUUUAUUCUGAUUACUUUGAGAGCCAUCACCAGCGACUA |
| | \hat{ }U15 | UGUCGUAGUGGGUAAAGCUCCCUCUUCGGAGGGAGCAUCAAAG |
| 2268 | 208:174 + | ACGGCGCUUUUAUCUGAUUACUUUGAGAGCCAUCACCAGCGACUAUG |
| | [U4] | UCGUAGUGGGUAAAGCUCCCUCUUCGGAGGGAGCAUCAAAG |
| 2269 | 209:174 + | ACUGGCGCUUUUAUAUGAUUACUUUGAGAGCCAUCACCAGCGACUAU |
| | C16A | GUCGUAGUGGGUAAAGCUCCCUCUUCGGAGGGAGCAUCAAAG |
| 2270 | 210:174 + | ACUGGCGCUUUUAUCUUGAUUACUUUGAGAGCCAUCACCAGCGACUA |
| | \hat{ }U17 | UGUCGUAGUGGGUAAAGCUCCCUCUUCGGAGGGAGCAUCAAAG |
| 2271 | 211:174 + | ACUGGCGCUUUUAUCUGAUUACUUUGAGAGCCAGCACCAGCGACUAU |
| | U35G | GUCGUAGUGGGUAAAGCUCCCUCUUCGGAGGGAGCAUCAAAG |
| | (compare with | |
| | 174 + U35A | |
| | above) | |
| 2272 | 212:174 | ACUGGCGCUGUUAUCUGAUUACUUCGAGAGCCAUCACCAGCGACUAU |
| | + U11G, | GUCGUAGUGGGUAAAGCUCCCUCUUCGGAGGGAGCAUCGAAG |
| | A105G | |
| | (A86G), | |
| | U26C | |
| 2273 | 213:174 | ACUGGCGCUCUUAUCUGAUUACUUCGAGAGCCAUCACCAGCGACUAU |
| | + U11C, | GUCGUAGUGGGUAAAGCUCCCUCUUCGGAGGGAGCAUCGAAG |
| | A105G | |
| | (A86G), | |
| | U26C | |
| 2274 | 214: | ACUGGCGCUUGUAUCUGAUUACUCUGAGAGCCAUCACCAGCGACUAU |
| | 174 + U12G; | GUCGUAGUGGGUAAAGCUCCCUCUUCGGAGGGAGCAUCAGAG |
| | A106G | |
| | (A87G), | |
| | U25C | |
| 2275 | 215: | ACUGGCGCUUCUAUCUGAUUACUCUGAGAGCCAUCACCAGCGACUAU |
| | 174 + U12C; | GUCGUAGUGGGUAAAGCUCCCUCUUCGGAGGGAGCAUCAGAG |
| | A106G | |
| | (A87G), | |
| | U25C | |
| 2276 | 216: | ACUGGCGCUUUGAUCUGAUUACCUUGAGAGCCAUCACCAGCGACUAU |
| | 174_tx_11.G, | GUCGUAGUGGGUAAAGCUCCCUCUUCGGAGGGAGCAUCAAGG |
| | 87.G, 22.C | |
| 2277 | 217: | ACUGGCGCUUUCAUCUGAUUACCUUGAGAGCCAUCACCAGCGACUAU |
| | 174_tx_11.C, | GUCGUAGUGGGUAAAGCUCCCUCUUCGGAGGGAGCAUCAAGG |
| | 78.G, 22.C | |
| 2278 | 218:174 | ACUGGCGCUGUUAUCUGAUUACUUUGAGAGCCAUCACCAGCGACUAU |
| | + U11G | GUCGUAGUGGGUAAAGCUCCCUCUUCGGAGGGAGCAUCAAAG |
| 2279 | 219:174 | ACUGGCGCUUUUAUCUGAUUACUUUGAGAGCCAUCACCAGCGACUAU |
| | + A105G | GUCGUAGUGGGUAAAGCUCCCUCUUCGGAGGGAGCAUCGAAG |
| | (A86G) | |
| 2280 | 220:174 | ACUGGCGCUUUUAUCUGAUUACUUCGAGAGCCAUCACCAGCGACUAU |
| | + U26C | GUCGUAGUGGGUAAAGCUCCCUCUUCGGAGGGAGCAUCAAAG |
| 2281 | 221:182 + | ACUGGCACUUCUAUCUGAUUACUCUGAGAGCCAUCACCAGCGACUAU |
| | G8A(196) | GUCGUAUGGGUAAAGCCGCUUACGGACUUCGGUCCGUAAGAGGCAUC |
| | + 215 | AGAG |
| | mutations + | |
| | AC63, A88G | |
| 2282 | 222:174 + | ACUGGCACUUCUAUCUGAUUACUCUGAGAGCCAUCACCAGCGACUAU |
| | G8A(196) | GUCGUAGUGGGUAAAGCUCCCUCUUCGGAGGGAGCAUCAGAG |
| | + 215 | |
| | mutations | |
| 2283 | 223:181 + | ACUGGCACCUUUAUCUGAUUACUUUGAGAGCCAUCACCAGCGACUAU |
| | G8A(196) + | GUCGUAUGGGUAAAGCCGCUUACGGACUUCGGUCCGUAAGAGGCAUC |
| | AC63, A88G | AAAG |
| 2284 | 224:182 + | ACUGGCACUUGUAUCUGAUUACUCUGAGAGCCAUCACCAGCGACUAU |
| | G8A(196) | GUCGUAUGGGUAAAGCCGCUUACGGACUUCGGUCCGUAAGAGGCAUC |
| | + 214 | AGAG |
| | mutations + | |
| | AC63, A88G | |
| 2285 | 225:174 + | ACUGGCACUUGUAUCUGAUUACUCUGAGAGCCAUCACCAGCGACUAU |
| | G8A(196) | GUCGUAGUGGGUAAAGCUCCCUCUUCGGAGGGAGCAUCAGAG |
| | + 214 | |
| | mutations | |

[0137] In some embodiments, the gNA variant comprises a tracrRNA stem loop comprising the sequence -UUU-N4-25-UUU- (SEQ ID NO: 34). For example, the gNA variant comprises a scaffold stem loop or a replacement thereof, flanked by two triplet U motifs that contribute to the triplex region. In some embodiments, the scaffold stem loop or replacement thereof comprises at least 4 nucleotides, at least 5 nucleotides, at least 6 nucleotides, at least 7 nucleotides, at least 7 nucleotides, at least 8 nucleotides, at least 9 nucleotides, at least 10 nucleotides, at least 11 nucleotides, at least 12 nucleotides, at least 13 nucleotides, at least 14 nucleotides, at least 15 nucleotides, at least 16 nucleotides, at least 17 nucleotides, at least 18 nucleotides, at least 19 nucleotides, at least 20 nucleotides, at least 21 nucleotides, at least 22 nucleotides, at least 23 nucleotides, at least 24 nucleotides, or at least 25 nucleotides.

[0138] In some embodiments, the gNA variant comprises a crRNA sequence with -AAAG- in a location 5′ to the spacer region. In some embodiments, the -AAAG- sequence is immediately 5′ to the spacer region.

[0139] In some embodiments, the at least one nucleotide modification to a reference gNA to produce a gNA variant comprises at least one nucleotide deletion in the CasX variant gNA relative to the reference gRNA. In some embodiments, a gNA variant comprises a deletion of 1, 2, 3, 4, 5, 6, 7, 8, 9, 10, 11, 12, 13, 14, 15, 16, 17, 18, 19 or 20 consecutive or non-consecutive nucleotides relative to a reference gNA. In some embodiments, the at least one deletion comprises a deletion of 1, 2, 3, 4, 5, 6, 7, 8, 9, 10, 11, 12, 13, 14, 15, 16, 17, 18, 19 or 20 or more consecutive nucleotides relative to a reference gNA. In some embodiments, the gNA variant comprises 2, 3, 4, 5, 6, 7, 8, 9, 10, 11, 12, 13, 14, 15, 16, 17, 18, 19 or 20 or more nucleotide deletions relative to the reference gNA, and the deletions are not in consecutive nucleotides. In those embodiments where there are two or more non-consecutive deletions in the gNA variant relative to the reference gRNA, any length of deletions, and any combination of lengths of deletions, as described herein, are contemplated as within the scope of the disclosure. For example, in some embodiments, a gNA variant may comprise a first deletion of one nucleotide, and a second deletion of two nucleotides and the two deletions are not consecutive. In some embodiments, a gNA variant comprises at least two deletions in different regions of the reference gRNA. In some embodiments, a gNA variant comprises at least two deletions in the same region of the reference gRNA. For example, the regions may be the extended stem loop, scaffold stem loop, scaffold stem bubble, triplex loop, pseudoknot, triplex, or a 5′ end of the gNA variant. The deletion of any nucleotide in a reference gRNA is contemplated as within the scope of the disclosure.

[0140] In some embodiments, the at least one nucleotide modification of a reference gRNA to generate a gNA variant comprises at least one nucleotide insertion. In some embodiments, a gNA variant comprises an insertion of 1, 2, 3, 4, 5, 6, 7, 8, 9 or 10 consecutive or non-consecutive nucleotides relative to a reference gRNA. In some embodiments, the at least one nucleotide insertion comprises an insertion of 1, 2, 3, 4, 5, 6, 7, 8, 9, 10, 11, 12, 13, 14, 15, 16, 17, 18, 19 or 20 or more consecutive nucleotides relative to a reference gRNA. In some embodiments, the gNA variant comprises 2 or more insertions relative to the reference gRNA, and the insertions are not consecutive. In those embodiments where there are two or more non-consecutive insertions in the gNA variant relative to the reference gRNA, any length of insertions, and any combination of lengths of insertions, as described herein, are contemplated as within the scope of the disclosure. For example, in some embodiments, a gNA variant may comprise a first insertion of one nucleotide, and a second insertion of two nucleotides and the two insertions are not consecutive. In some embodiments, a gNA variant comprises at least two insertions in different regions of the reference gRNA. In some embodiments, a gNA variant comprises at least two insertions in the same region of the reference gRNA. For example, the regions may be the extended stem loop, scaffold stem loop, scaffold stem bubble, triplex loop, pseudoknot, triplex, or a 5′ end of the gNA variant. Any insertion of A, G, C, U (or T, in the corresponding DNA) or combinations thereof at any location in the reference gRNA is contemplated as within the scope of the disclosure.

[0141] In some embodiments, the at least one nucleotide modification of a reference gRNA to generate a gNA variant comprises at least one nucleic acid substitution. In some embodiments, a gNA variant comprises 1, 2, 3, 4, 5, 6, 7, 8, 9, 10, 11, 12, 13, 14, 15, 16, 17, 18, 19 or 20 or more consecutive or non-consecutive substituted nucleotides relative to a reference gRNA. In some embodiments, a gNA variant comprises 1-4 nucleotide substitutions relative to a reference gRNA. In some embodiments, the at least one substitution comprises a substitution of 1, 2, 3, 4, 5, 6, 7, 8, 9, 10, 11, 12, 13, 14, 15, 16, 17, 18, 19 or 20 or more consecutive nucleotides relative to a reference gRNA. In some embodiments, the gNA variant comprises 2 or more substitutions relative to the reference gRNA, and the substitutions are not consecutive. In those embodiments where there are two or more non-consecutive substitutions in the gNA variant relative to the reference gRNA, any length of substituted nucleotides, and any combination of lengths of substituted nucleotides, as described herein, are contemplated as within the scope of the disclosure. For example, in some embodiments, a gNA variant may comprise a first substitution of one nucleotide, and a second substitution of two nucleotides and the two substitutions are not consecutive. In some embodiments, a gNA variant comprises at least two substitutions in different regions of the reference gRNA. In some embodiments, a gNA variant comprises at least two substitutions in the same region of the reference gRNA. For example, the regions may be the triplex, the extended stem loop, scaffold stem loop, scaffold stem bubble, triplex loop, pseudoknot, triplex, or a 5′ end of the gNA variant. Any substitution of A, G, C, U (or T, in the corresponding DNA) or combinations thereof at any location in the reference gRNA is contemplated as within the scope of the disclosure.

[0142] Any of the substitutions, insertions and deletions described herein can be combined to generate a gNA variant of the disclosure. For example, a gNA variant can comprise at least one substitution and at least one deletion relative to a reference gRNA, at least one substitution and at least one insertion relative to a reference gRNA, at least one insertion and at least one deletion relative to a reference gRNA, or at least one substitution, one insertion and one deletion relative to a reference gRNA.

[0143] In some embodiments, the gNA variant comprises a scaffold region at least 20% identical, at least 30% identical, at least 40% identical, at least 50% identical, at least 60% identical, at least 65% identical, at least 70% identical, at least 75% identical, at least 80% identical, at least 85% identical, at least 90% identical, at least 91% identical, at least 92% identical, at least 93% identical, at least 94% identical, at least 95% identical, at least 96% identical, at least 97% identical, at least 98% identical, or at least 99% identical to any one of SEQ ID NOS: 4-16. In some embodiments, the gNA variant comprises a scaffold region at least 60% homologous (or identical) to any one of SEQ ID NOS: 4-16.

[0144] In some embodiments, the gNA variant comprises a tracr stem loop at least 60% identical, at least 65% identical, at least 70% identical, at least 75% identical, at least 80% identical, at least 85% identical, at least 90% identical, at least 91% identical, at least 92% identical, at least 93% identical, at least 94% identical, at least 95% identical, at least 96% identical, at least 97% identical, at least 98% identical, or at least 99% identical to SEQ ID NO: 14. In some embodiments, the gNA variant comprises a tracr stem loop at least 60% homologous (or identical) to SEQ ID NO: 14.

[0145] In some embodiments, the gNA variant comprises an extended stem loop at least 60% identical, at least 65% identical, at least 70% identical, at least 75% identical, at least 80% identical, at least 85% identical, at least 90% identical, at least 91% identical, at least 92% identical, at least 93% identical, at least 94% identical, at least 95% identical, at least 96% identical, at least 97% identical, at least 98% identical, or at least 99% identical to SEQ ID NO: 15. In some embodiments, the gNA variant comprises an extended stem loop at least 60% homologous (or identical) to SEQ ID NO: 15.

[0146] In some embodiments, the gNA variant comprises an exogenous extended stem loop, with such differences from a reference gNA described as follows. In some embodiments, an exogenous extended stem loop has little or no identity to the reference stem loop regions disclosed herein (e.g., SEQ ID NO:15). In some embodiments, an exogenous stem loop is at least 10 bp, at least 20 bp, at least 30 bp, at least 40 bp, at least 50 bp, at least 60 bp, at least 70 bp, at least 80 bp, at least 90 bp, at least 100 bp, at least 200 bp, at least 300 bp, at least 400 bp, at least 500 bp, at least 600 bp, at least 700 bp, at least 800 bp, at least 900 bp, at least 1,000 bp, at least 2,000 bp, at least 3,000 bp, at least 4,000 bp, at least 5,000 bp, at least 6,000 bp, at least 7,000 bp, at least 8,000 bp, at least 9,000 bp, at least 10,000 bp, at least 12,000 bp, at least 15,000 bp or at least 20,000 bp. In some embodiments, the gNA variant comprises an extended stem loop region comprising at least 10, at least 100, at least 500, at least 1000, or at least 10,000 nucleotides. In some embodiments, the heterologous stem loop increases the stability of the gNA. In some embodiments, the heterologous RNA stem loop is capable of binding a protein, an RNA structure, a DNA sequence, or a small molecule. In some embodiments, an exogenous stem loop region replacing the stem loop comprises an RNA stem loop or hairpin in which the resulting gNA has increased stability and, depending on the choice of loop, can interact with certain cellular proteins or RNA. Such exogenous extended stem loops can comprise, for example a thermostable RNA such as MS2 (ACAUGAGGAUUACCCAUGU (SEQ ID NO: 35)), Qβ (UGCAUGUCUAAGACAGCA (SEQ ID NO: 36)), U1 hairpin II (AAUCCAUUGCACUCCGGAUU (SEQ ID NO: 37)), Uvsx (CCUCUUCGGAGG (SEQ ID NO: 38)), PP7 (AGGAGUUUCUAUGGAAACCCU (SEQ ID NO: 39)), Phage replication loop (AGGUGGGACGACCUCUCGGUCGUCCUAUCU (SEQ ID NO: 40)), Kissing loop_a (UGCUCGCUCCGUUCGAGCA (SEQ ID NO: 41)), Kissing loop_b1 (UGCUCGACGCGUCCUCGAGCA (SEQ ID NO: 42)), Kissing loop_b2 (UGCUCGUUUGCGGCUACGAGCA (SEQ ID NO: 43)), G quadriplex M3q (AGGGAGGGAGGGAGAGG (SEQ ID NO: 44)), G quadriplex telomere basket (GGUUAGGGUUAGGGUUAGG (SEQ ID NO: 45)), Sarcin-ricin loop (CUGCUCAGUACGAGAGGAACCGCAG (SEQ ID NO: 46)) or Pseudoknots (UACACUGGGAUCGCUGAAUUAGAGAUCGGCGUCCUUUCAUUCUAUAUACUUUGG AGUUUUAAAAUGUCUCUAAGUACA (SEQ ID NO: 47)). In some embodiments, an exogenous stem loop comprises a long non-coding RNA (lncRNA). As used herein, a lncRNA refers to a non-coding RNA that is longer than approximately 200 bp in length. In some embodiments, the 5′ and 3′ ends of the exogenous stem loop are base paired; i.e., interact to form a region of duplex RNA. In some embodiments, the 5′ and 3′ ends of the exogenous stem loop are base paired, and one or more regions between the 5′ and 3′ ends of the exogenous stem loop are not base paired. In some embodiments, the at least one nucleotide modification comprises: (a) substitution of 1 to 15 consecutive or non-consecutive nucleotides in the gNA variant in one or more regions; (b) a deletion of 1 to 10 consecutive or non-consecutive nucleotides in the gNA variant in one or more regions; (c) an insertion of 1 to 10 consecutive or non-consecutive nucleotides in the gNA variant in one or more regions; (d) a substitution of the scaffold stem loop or the extended stem loop with an RNA stem loop sequence from a heterologous RNA source with proximal 5′ and 3′ ends; or any combination of (a)-(d).

[0147] In some embodiments, the gNA variant comprises a scaffold stem loop sequence of CCAGCGACUAUGUCGUAGUGG (SEQ ID NO: 32). In some embodiments, the gNA variant comprises a scaffold stem loop sequence of CCAGCGACUAUGUCGUAGUGG (SEQ ID NO: 32) with at least 1, 2, 3, 4, or 5 mismatches thereto.

[0148] In some embodiments, the gNA variant comprises an extended stem loop region comprising less than 32 nucleotides, less than 31 nucleotides, less than 30 nucleotides, less than 29 nucleotides, less than 28 nucleotides, less than 27 nucleotides, less than 26 nucleotides, less than 25 nucleotides, less than 24 nucleotides, less than 23 nucleotides, less than 22 nucleotides, less than 21 nucleotides, or less than 20 nucleotides. In some embodiments, the gNA variant comprises an extended stem loop region comprising less than 32 nucleotides. In some embodiments, the gNA variant further comprises a thermostable stem loop.

[0149] In some embodiments, a gNA variant comprises a sequence of any one of SEQ ID NOS: 2201-2285, or having at least about 80%, at least about 90%, at least about 95%, at least about 96%, at least about 97%, at least about 98%, at least about 99% identity thereto. In some embodiments, a gNA variant comprises a sequence selected from the group consisting of SEQ ID NOS: 2106, 2237, 2238, 2239, 2241, 2244, 2275, 2279, 2280, and 2285.

[0150] In some embodiments of the gNA variants of the disclosure, the gNA variant comprises at least one modification, wherein the at least one modification compared to the reference guide scaffold of SEQ ID NO: 5 is selected from one or more of: (a) a C18G substitution in the triplex loop; (b) a G55 insertion in the stem bubble; (c) a U1 deletion; (d) a modification of the extended stem loop wherein (i) a 6 nt loop and 13 loop-proximal base pairs are replaced by a Uvsx hairpin; and (ii) a deletion of A99 and a substitution of G65U that results in a loop-distal base that is fully base-paired. In such embodiments, the gNA variant comprises the sequence of any one of SEQ ID NOS: 2236, 2237, 2238, 2241, 2244, 2248, 2249, or 2259-2285.

[0151] In exemplary embodiments, a sgRNA variant comprises one or more additional changes to a sequence of SEQ ID NO: 2238 (Variant Scaffold 174, referencing Table 2).

[0152] In exemplary embodiments, a sgRNA variant comprises one or more additional changes to a sequence of SEQ ID NO: 2239 (Variant Scaffold 175, referencing Table 2).

[0153] In some embodiments, the gNA variant further comprises a spacer (or targeting sequence) region located at the 3′ end of the gNA, described more fully, supra, which comprises at least 14 to about 35 nucleotides wherein the spacer is designed with a sequence that is complementary to a target DNA. In some embodiments, the gNA variant comprises a targeting sequence of at least 10 to 30 nucleotides complementary to a target DNA. In some embodiments, the targeting sequence has 14, 15, 16, 17, 18, 19, 20, 21, 22, 23, 24, 25, 26, 27, 28, 29, 30, 31, 32, 33, 34 or 35 nucleotides. In some embodiments, the gNA variant comprises a targeting sequence having 20 nucleotides. In some embodiments, the targeting sequence has 25 nucleotides. In some embodiments, the targeting sequence has 24 nucleotides. In some embodiments, the targeting sequence has 23 nucleotides. In some embodiments, the targeting sequence has 22 nucleotides. In some embodiments, the targeting sequence has 21 nucleotides. In some embodiments, the targeting sequence has 20 nucleotides. In some embodiments, the targeting sequence has 19 nucleotides. In some embodiments, the targeting sequence has 18 nucleotides. In some embodiments, the targeting sequence has 17 nucleotides. In some embodiments, the targeting sequence has 16 nucleotides. In some embodiments, the targeting sequence has 15 nucleotides. In some embodiments, the targeting sequence has 14 nucleotides.

[0154] In some embodiments, the scaffold of the gNA variant is part of an RNP with a CasX variant protein comprising a sequence of any one of SEQ ID NOS: 49-160, 439, 441, 443, 445, 447-460, 472, 474, 476, 478, 480, 482, 484, 486, 488, or 490 as set forth in Tables 3, 5, 6, 7 and 9, or a sequence having at least about 50%, at least about 60%, at least about 70%, at least about 80%, at least about 85%, at least about 90%, at least about 91%, at least about 92%, at least about 93%, at least about 94%, at least about 95%, at least about 96%, at least about 97%, at least about 98%, or at least about 99% identity thereto. In the foregoing embodiments, the gNA further comprises a spacer sequence.

[0155] In the embodiments of the gNA variants, the gNA variant further comprises a spacer (or targeting sequence) region located at the 3′ end of the gNA, described more fully, supra, which comprises at least 14 to about 35 nucleotides wherein the spacer is designed with a sequence that is complementary to a target nucleic acid. In some embodiments, the gNA variant comprises a targeting sequence of at least 10 to 30 nucleotides complementary to a target nucleic acid. In some embodiments, the targeting sequence has 14, 15, 16, 17, 18, 19, 20, 21, 22, 23, 24, 25, 26, 27, 28, 29, 30, 31, 32, 33, 34 or 35 nucleotides. In some embodiments, the gNA variant comprises a targeting sequence having 20 nucleotides. In some embodiments, the targeting sequence has 25 nucleotides. In some embodiments, the targeting sequence has 24 nucleotides. In some embodiments, the targeting sequence has 23 nucleotides. In some embodiments, the targeting sequence has 22 nucleotides. In some embodiments, the targeting sequence has 21 nucleotides. In some embodiments, the targeting sequence has 19 nucleotides. In some embodiments, the targeting sequence has 18 nucleotides. In some embodiments, the targeting sequence has 17 nucleotides. In some embodiments, the targeting sequence has 16 nucleotides. In some embodiments, the targeting sequence has 15 nucleotides. In some embodiments, the targeting sequence has 14 nucleotides. In some embodiments, the disclosure provides targeting sequences for inclusion in the gNA variants of the disclosure comprising a sequence selected from the group consisting of SEQ ID NOS: 247-303, 315-436, 612-2100, or 2286-13861, or a sequence that is at least 50% identical, at least 55% identical, at least 60% identical, at least 65% identical, at least 70% identical, at least 75% identical, at least 80% identical, at least 85% identical, at least 90% identical, at least 95% identical thereto. In some embodiments, the targeting sequence of the gNA variant comprises a sequence a sequence of SEQ ID NOS: 247-303, 315-436, 612-2100, or 2286-13861 with a single nucleotide removed from the 3′ end of the sequence. In other embodiments, the targeting sequence of the gNA variant comprises a sequence a sequence of SEQ ID NOS: 247-303, 315-436, 612-2100, or 2286-13861 with two nucleotides removed from the 3′ end of the sequence. In other embodiments, the targeting sequence of the gNA variant comprises a sequence a sequence of SEQ ID NOS: 247-303, 315-436, 612-2100, or 2286-13861 with three nucleotides removed from the 3′ end of the sequence. In other embodiments, the targeting sequence of the gNA variant comprises a sequence a sequence of SEQ ID NOS: 247-303, 315-436, 612-2100, or 2286-13861 with four nucleotides removed from the 3′ end of the sequence. In other embodiments, the targeting sequence of the gNA variant comprises a sequence a sequence of SEQ ID NOS: 247-303, 315-436, 612-2100, or 2286-13861 with five nucleotides removed from the 3′ end of the sequence.

[0156] In some embodiments, the gNA variant further comprises a spacer (targeting) region located at the 3′ end of the gNA, wherein the spacer is designed with a sequence that is complementary to a target nucleic acid. In some embodiments, the target nucleic acid comprises a PAM sequence located 5′ of the spacer with at least a single nucleotide separating the PAM from the first nucleotide of the spacer. In some embodiments, the PAM is located on the non-targeted strand of the target region, i.e. the strand that is complementary to the target nucleic acid. In some embodiments, the PAM sequence is ATC. In some embodiments, the targeting sequence for an ATC PAM comprises a sequence selected from the group consisting of SEQ ID NOS: 315-436, 612-2100, and 2286-3183, or a sequence that is at least 50% identical, at least 55% identical, at least 60% identical, at least 65% identical, at least 70% identical, at least 75% identical, at least 80% identical, at least 85% identical, at least 90% identical, at least 95% identical to SEQ ID NOS: 315-436, 612-2100, and 2286-3183. In some embodiments, the targeting sequence for an ATC PAM is selected from the group consisting of SEQ ID NOS: 315-436, 612-2100, and 2286-3183. In some embodiments, the PAM sequence is CTC. In some embodiments, the targeting sequence for a CTC PAM comprises a sequence selected from the group consisting of SEQ ID NOS: 7252-11521, or a sequence that is at least 50% identical, at least 55% identical, at least 60% identical, at least 65% identical, at least 70% identical, at least 75% identical, at least 80% identical, at least 85% identical, at least 90% identical, at least 95% identical to SEQ ID NOS: 7252-11521. In some embodiments, the targeting sequence for a CTC PAM is selected from the group consisting of SEQ ID NOS: 7252-11521. In some embodiments, the PAM sequence is GTC. In some embodiments, the targeting sequences for a GTC PAM comprises a sequence selected from the group consisting of SEQ ID NOS: 11522-13861 or a sequence that is at least 50% identical, at least 55% identical, at least 60% identical, at least 65% identical, at least 70% identical, at least 75% identical, at least 80% identical, at least 85% identical, at least 90% identical, at least 95% identical to SEQ ID NOS: 11522-13861. In some embodiments, the targeting sequence for a GTC PAM is selected from the group consisting of SEQ ID NOS: 11522-13861. In some embodiments, the PAM sequence is TTC. In some embodiments, a targeting sequences for a TTC PAM comprises a sequence selected from the group consisting of SEQ ID NOS: 3184-7251, or a sequence that is at least 50% identical, at least 55% identical, at least 60% identical, at least 65% identical, at least 70% identical, at least 75% identical, at least 80% identical, at least 85% identical, at least 90% identical, at least 95% identical to SEQ ID NOS: 3184-7251. In some embodiments, a targeting sequence for a TTC PAM is selected from the group consisting of SEQ ID NOS: 3184-7251.

[0157] In some embodiments, the gNA variant comprises a targeting sequence located at the 3′ end of the gNA wherein the targeting sequence is complementary to a target nucleic acid sequence comprising a mutation, wherein the mutation is a gain of function mutation. In a particular embodiment of the foregoing, the mutation comprises an amino acid substitution selected from the group consisting of S127R, D129G, F216L, D374H, and D374Y relative to the sequence of SEQ ID NO: 33 In another particular embodiment of the foregoing, the targeting sequence comprises a sequence selected from the group consisting of SEQ ID NOS: 247-303 as set forth in Table B. In another particular embodiment of the foregoing, the targeting sequence comprises a sequence selected from the group consisting of AGCAGGUCGCCUCUCAUCUU (SEQ ID NO: 272), CAUCUUCACCAGGAAGCCAG (SEQ ID NO: 273), CCUCUCAUCUUCACCAGGAA (SEQ ID NO: 274), UGGUGAAGAUGAGAGGCGAC (SEQ ID NO: 275), GUGGAGGCGGGUCCCGUCCU (SEQ ID NO: 281), AGCCACUGCAGCACCUGCUU (SEQ ID NO: 287), UUGGUGCCUCCAGCCACUGC (SEQ ID NO: 288), AGCUACUGCAGCACCUGCUU (SEQ ID NO: 289), and UUGGUGCCUCCAGCUACUGC (SEQ ID NO: 290). In another particular embodiment of the foregoing, the targeting sequence consists of a sequence selected from the group consisting of AGCAGGUCGCCUCUCAUCUU (SEQ ID NO: 272), CAUCUUCACCAGGAAGCCAG (SEQ ID NO: 273), CCUCUCAUCUUCACCAGGAA (SEQ ID NO: 274), UGGUGAAGAUGAGAGGCGAC (SEQ ID NO: 275), GUGGAGGCGGGUCCCGUCCU (SEQ ID NO: 281), AGCCACUGCAGCACCUGCUU (SEQ ID NO: 287), UUGGUGCCUCCAGCCACUGC (SEQ ID NO: 288), AGCUACUGCAGCACCUGCUU (SEQ ID NO: 289), and UUGGUGCCUCCAGCUACUGC (SEQ ID NO: 290). In other embodiments, the gNA variant comprises a targeting sequence located at the 3′ end of the gNA wherein the targeting sequence is complementary to a target nucleic acid sequence comprising a mutation, wherein the mutation is a loss of function mutation. In a particular embodiment of the foregoing, the mutation comprises an amino acid substitution selected from the group consisting of R46L, G106R, Y142X, N157K, R237W or C679X relative to the sequence of SEQ ID NO: 33.

[0158] g. Complex Formation with CasX Protein

[0159] In some embodiments, a gNA variant has an improved ability to form a complex with a CasX protein (such as a reference CasX or a CasX variant protein) when compared to a reference gRNA. In some embodiments, a gNA variant has an improved affinity for a CasX protein (such as a reference or variant protein) when compared to a reference gRNA, thereby improving its ability to form a ribonucleoprotein (RNP) complex with the CasX protein, as described in the Examples. Improving ribonucleoprotein complex formation may, in some embodiments, improve the efficiency with which functional RNPs are assembled. In some embodiments, greater than 90%, greater than 93%, greater than 95%, greater than 96%, greater than 97%, greater than 98% or greater than 99% of RNPs comprising a gNA variant scaffold of the disclosure and its spacer are competent for gene editing of a target nucleic acid.

[0160] Exemplary nucleotide changes that can improve the ability of gNA variants to form a complex with CasX protein may, in some embodiments, include replacing the scaffold stem with a thermostable stem loop. Without wishing to be bound by any theory, replacing the scaffold stem with a thermostable stem loop could increase the overall binding stability of the gNA variant with the CasX protein. Alternatively, or in addition, removing a large section of the stem loop could change the gNA variant folding kinetics and make a functional folded gNA easier and quicker to structurally-assemble, for example by lessening the degree to which the gNA variant can get “tangled” in itself. In some embodiments, choice of scaffold stem loop sequence could change with different spacers that are utilized for the gNA. In some embodiments, scaffold sequence can be tailored to the spacer and therefore the target sequence. Biochemical assays can be used to evaluate the binding affinity of CasX protein for the gNA variant to form the RNP, including the assays of the Examples. For example, a person of ordinary skill can measure changes in the amount of a fluorescently tagged gNA that is bound to an immobilized CasX protein, as a response to increasing concentrations of an additional unlabeled “cold competitor” gNA. Alternatively, or in addition, fluorescence signal can be monitored to or seeing how it changes as different amounts of fluorescently labeled gNA are flowed over immobilized CasX protein. Alternatively, the ability to form an RNP can be assessed using in vitro cleavage assays against a defined target nucleic acid sequence.

[0161] h. gNA Stability

[0162] In some embodiments, a gNA variant has improved stability when compared to a reference gRNA. Increased stability and efficient folding may, in some embodiments, increase the extent to which a gNA variant persists inside a target cell, which may thereby increase the chance of forming a functional RNP capable of carrying out CasX functions such as gene editing. Increased stability of gNA variants may also, in some embodiments, allow for a similar outcome with a lower amount of gNA delivered to a cell, which may in turn reduce the chance of off-target effects during gene editing. Guide RNA stability can be assessed in a variety of ways, including for example in vitro by assembling the guide, incubating for varying periods of time in a solution that mimics the intracellular environment, and then measuring functional activity via the in vitro cleavage assays described herein. Alternatively, or in addition, gNAs can be harvested from cells at varying time points after initial transfection/transduction of the gNA to determine how long gNA variants persist relative to reference gRNAs.

[0163] i. Solubility

[0164] In some embodiments, a gNA variant has improved solubility when compared to a reference gRNA. In some embodiments, a gNA variant has improved solubility of the CasX protein:gNA RNP when compared to a reference gRNA. In some embodiments, solubility of the CasX protein:gNA RNP is improved by the addition of a ribozyme sequence to a 5′ or 3′ end of the gNA variant, for example the 5′ or 3′ of a reference sgRNA. Some ribozymes, such as the M1 ribozyme, can increase solubility of proteins through RNA mediated protein folding. Increased solubility of CasX RNPs comprising a gNA variant as described herein can be evaluated through a variety of means known to one of skill in the art, such as by taking densitometry readings on a gel of the soluble fraction of lysed E. coli in which the CasX and gNA variants are expressed.

[0165] j. Resistance to Nuclease Activity

[0166] In some embodiments, a gNA variant has improved resistance to nuclease activity compared to a reference gRNA that may, for example, increase the persistence of a variant gNA in an intracellular environment, thereby improving gene editing. Resistance to nuclease activity may be evaluated through a variety of methods known to one of skill in the art. For example, in vitro methods of measuring resistance to nuclease activity may include for example contacting reference gNA and variants with one or more exemplary RNA nucleases and measuring degradation. Alternatively, or in addition, measuring persistence of a gNA variant in a cellular environment using the methods described herein can indicate the degree to which the gNA variant is nuclease resistant.

[0167] k. Binding Affinity to a Target DNA

[0168] In some embodiments, a gNA variant has improved affinity for the target DNA relative to a reference gRNA. In certain embodiments, a ribonucleoprotein complex comprising a gNA variant has improved affinity for the target DNA, relative to the affinity of an RNP comprising a reference gRNA. In some embodiments, the improved affinity of the RNP for the target DNA comprises improved affinity for the target sequence, improved affinity for the PAM sequence, improved ability of the RNP to search DNA for the target sequence, or any combinations thereof. In some embodiments, the improved affinity for the target DNA is the result of increased overall DNA binding affinity.

[0169] Without wishing to be bound by theory, it is possible that nucleotide changes in the gNA variant that affect the function of the OBD in the CasX protein may increase the affinity of CasX variant protein binding to the protospacer adjacent motif (PAM), as well as the ability to bind or utilize an increased spectrum of PAM sequences other than the canonical TTC PAM recognized by the reference CasX protein of SEQ ID NO:2, including PAM sequences selected from the group consisting of TTC, ATC, GTC, and CTC, thereby increasing the affinity and diversity of the CasX variant protein for target DNA sequences, resulting in a substantial increase in the target nucleic acid sequences that can be edited and/or bound, compared to a reference CasX. As described more fully, below, increasing the sequences of the target nucleic acid that can be edited, compared to a reference CasX, refers to both the PAM and the protospacer sequence and their directionality according to the orientation of the non-target strand. This does not imply that the PAM sequence of the non-target strand, rather than the target strand, is determinative of cleavage or mechanistically involved in target recognition. For example, when reference is to a TTC PAM, it may in fact be the complementary GAA sequence that is required for target cleavage, or it may be some combination of nucleotides from both strands. In the case of the CasX proteins disclosed herein, the PAM is located 5′ of the protospacer with at least a single nucleotide separating the PAM from the first nucleotide of the protospacer. Alternatively, or in addition, changes in the gNA that affect function of the helical I and/or helical II domains that increase the affinity of the CasX variant protein for the target DNA strand can increase the affinity of the CasX RNP comprising the variant gNA for target DNA. Without being bound to theory or mechanism, the enhanced binding to target DNA can lead to enhanced cleavage rate of the target DNA by the RNP, wherein the RNP has at least a 5-fold, at least a 10-fold, or at least a 30-fold increased cleavage rate in an in vitro assay compared to an RNP of the reference CasX and the gNA of SEQ ID NO: 4 or SEQ ID NO:5.

[0170] l. Adding or Changing gNA Function

[0171] In some embodiments, gNA variants can comprise larger structural changes that change the topology of the gNA variant with respect to the reference gRNA, thereby allowing for different gNA functionality. For example, in some embodiments a gNA variant has swapped an endogenous stem loop of the reference gRNA scaffold with a previously identified stable RNA structure or a stem loop that can interact with a protein or RNA binding partner to recruit additional moieties to the CasX or to recruit CasX to a specific location, such as the inside of a viral capsid, that has the binding partner to the said RNA structure. In other scenarios the RNAs may be recruited to each other, as in Kissing loops, such that two CasX proteins can be co-localized for more effective gene editing at the target DNA sequence. Such RNA structures may include MS2, Qβ, U1 hairpin II, Uvsx, PP7, Phage replication loop, Kissing loop_a, Kissing loop_b1, Kissing loop_b2, G quadriplex M3q, G quadriplex telomere basket, Sarcin-ricin loop, or a Pseudoknot.

[0172] In some embodiments, a gNA variant comprises a terminal fusion partner. Exemplary terminal fusions may include fusion of the gRNA to a self-cleaving ribozyme or protein binding motif. As used herein, a “ribozyme” refers to an RNA or segment thereof with one or more catalytic activities similar to a protein enzyme. Exemplary ribozyme catalytic activities may include, for example, cleavage and/or ligation of RNA, cleavage and/or ligation of DNA, or peptide bond formation. In some embodiments, such fusions could either improve scaffold folding or recruit DNA repair machinery. For example, a gRNA may in some embodiments be fused to a hepatitis delta virus (HDV) antigenomic ribozyme, HDV genomic ribozyme, hatchet ribozyme (from metagenomic data), env25 pistol ribozyme (representative from Aliistipes putredinis), HH15 Minimal Hammerhead ribozyme, tobacco ringspot virus (TRSV) ribozyme, WT viral Hammerhead ribozyme (and rational variants), or Twisted Sister 1 or RBMX recruiting motif. Hammerhead ribozymes are RNA motifs that catalyze reversible cleavage and ligation reactions at a specific site within an RNA molecule. Hammerhead ribozymes include type I, type II and type III hammerhead ribozymes. The HDV, pistol, and hatchet ribozymes have self-cleaving activities. gNA variants comprising one or more ribozymes may allow for expanded gNA function as compared to a gRNA reference. For example, gNAs comprising self-cleaving ribozymes can, in some embodiments, be transcribed and processed into mature gNAs as part of polycistronic transcripts. Such fusions may occur at either the 5′ or the 3′ end of the gNA. In some embodiments, a gNA variant comprises a fusion at both the 5′ and the 3′ end, wherein each fusion is independently as described herein. In some embodiments, a gNA variant comprises a phage replication loop or a tetraloop. In some embodiments, a gNA comprises a hairpin loop that is capable of binding a protein. For example, in some embodiments the hairpin loop is an MS2, Qβ, U1 hairpin II, Uvsx, or PP7 hairpin loop. Exemplary sequences encoding ribozymes are selected from the group consisting of SEQ ID NOS: 598-611, as described in Table 16.

[0173] In some embodiments, a gNA variant comprises one or more RNA aptamers. As used herein, an “RNA aptamer” refers to an RNA molecule that binds a target with high affinity and high specificity. In some embodiments, a gNA variant comprises one or more riboswitches. As used herein, a “riboswitch” refers to an RNA molecule that changes state upon binding a small molecule. In some embodiments, the gNA variant further comprises one or more protein binding motifs. Adding protein binding motifs to a reference gRNA or gNA variant of the disclosure may, in some embodiments, allow a CasX RNP to associate with additional proteins, which can, for example, add the functionality of those proteins to the CasX RNP.

[0174] m. Chemically Modified gNA

[0175] In some embodiments, the disclosure relates to chemically-modified gNA. In some embodiments, the present disclosure provides a chemically-modified gNA that has guide RNA functionality and has reduced susceptibility to cleavage by a nuclease. A gNA that comprises any nucleotide other than the four canonical ribonucleotides A, C, G, and U, or a deoxynucleotide, is a chemically modified gNA. In some cases, a chemically-modified gNA comprises any backbone or internucleotide linkage other than a natural phosphodiester internucleotide linkage. In certain embodiments, the retained functionality includes the ability of the modified gNA to bind to a CasX of any of the embodiments described herein. In certain embodiments, the retained functionality includes the ability of the modified gNA to bind to a PCSK9 target nucleic acid sequence. In certain embodiments, the retained functionality includes targeting a CasX protein or the ability of a pre-complexed CasX protein-gNA to bind to a target nucleic acid sequence. In certain embodiments, the retained functionality includes the ability to nick a target polynucleotide by a CasX-gNA. In certain embodiments, the retained functionality includes the ability to cleave a target nucleic acid sequence by a CasX-gNA. In certain embodiments, the retained functionality is any other known function of a gNA in a CasX system with a CasX protein of the embodiments of the disclosure.

[0176] In some embodiments, the disclosure provides a chemically-modified gNA in which a nucleotide sugar modification is incorporated into the gNA selected from the group consisting of 2′-O-C1-4alkyl such as 2′-O-methyl (2′-OMe), 2′-deoxy (2′-H), 2′-O-C1-3alkyl-O-C1-3alkyl such as 2′-methoxyethyl (“2′-MOE”), 2′-fluoro (“2′-F”), 2′-amino (“2′-NH₂”), 2′-arabinosyl (“2′-arabino”) nucleotide, 2′-F-arabinosyl (“2′-F-arabino”) nucleotide, 2′-locked nucleic acid (“LNA”) nucleotide, 2′-unlocked nucleic acid (“ULNA”) nucleotide, a sugar in L form (“L-sugar”), and 4′-thioribosyl nucleotide. In other embodiments, an internucleotide linkage modification incorporated into the guide RNA is selected from the group consisting of: phosphorothioate “P(S)” (P(S)), phosphonocarboxylate (P(CH₂)ₙCOOR) such as phosphonoacetate “PACE” (P(CH₂COO⁻)), thiophosphonocarboxylate ((S)P(CH₂)ₙCOOR) such as thiophosphonoacetate “thioPACE” ((S)P(CH₂)ₙCOO⁻)), alkylphosphonate (P(C₁₋₃alkyl) such as methylphosphonate —P(CH₃), boranophosphonate (P(BH₃)), and phosphorodithioate (P(S)₂).

[0177] In certain embodiments, the disclosure provides a chemically-modified gNA in which a nucleobase (“base”) modification is incorporated into the gNA selected from the group consisting of: 2-thiouracil (“2-thioU”), 2-thiocytosine (“2-thioC”), 4-thiouracil (“4-thioU”), 6-thioguanine (“6-thioG”), 2-aminoadenine (“2-aminoA”), 2-aminopurine, pseudouracil, hypoxanthine, 7-deazaguanine, 7-deaza-8-azaguanine, 7-deazaadenine, 7-deaza-8-azaadenine, 5-methylcytosine (“5-methylC”), 5-methyluracil (“5-methylU”), 5-hydroxymethylcytosine, 5-hydroxymethyluracil, 5,6-dehydrouracil, 5-propynylcytosine, 5-propynyluracil, 5-ethynylcytosine, 5-ethynyluracil, 5-allyluracil (“5-allylU”), 5-allylcytosine (“5-allylC”), 5-aminoallyluracil (“5-aminoallylU”), 5-aminoallyl-cytosine (“5-aminoallylC”), an abasic nucleotide, Z base, P base, Unstructured Nucleic Acid (“UNA”), isoguanine (“isoG”), isocytosine (“isoC”), 5-methyl-2-pyrimidine, x(A,G,C,T) and y(A,G,C,T).

[0178] In other embodiments, the disclosure provides a chemically-modified gNA in which one or more isotopic modifications are introduced on the nucleotide sugar, the nucleobase, the phosphodiester linkage and/or the nucleotide phosphates, including nucleotides comprising one or more ¹⁵N, ¹³C, ¹⁴C, deuterium, ³H, ³²P, ¹²⁵I, ¹³¹I atoms or other atoms or elements used as tracers.

[0179] In some embodiments, an “end” modification incorporated into the gNA is selected from the group consisting of: PEG (polyethyleneglycol), hydrocarbon linkers (including: heteroatom (O,S,N)-substituted hydrocarbon spacers; halo-substituted hydrocarbon spacers; keto-, carboxyl-, amido-, thionyl-, carbamoyl-, thionocarbamaoyl-containing hydrocarbon spacers), spermine linkers, dyes including fluorescent dyes (for example fluoresceins, rhodamines, cyanines) attached to linkers such as for example 6-fluorescein-hexyl, quenchers (for example dabcyl, BHQ) and other labels (for example biotin, digoxigenin, acridine, streptavidin, avidin, peptides and/or proteins). In some embodiments, an “end” modification comprises a conjugation (or ligation) of the gNA to another molecule comprising an oligonucleotide of deoxynucleotides and/or ribonucleotides, a peptide, a protein, a sugar, an oligosaccharide, a steroid, a lipid, a folic acid, a vitamin and/or other molecule. In certain embodiments, the disclosure provides a chemically-modified gNA in which an “end” modification (described above) is located internally in the gNA sequence via a linker such as, for example, a 2-(4-butylamidofluorescein)propane-1,3-diol bis(phosphodiester) linker, which is incorporated as a phosphodiester linkage and can be incorporated anywhere between two nucleotides in the gNA.

[0180] In some embodiments, the disclosure provides a chemically-modified gNA having an end modification comprising a terminal functional group such as an amine, a thiol (or sulfhydryl), a hydroxyl, a carboxyl, carbonyl, thionyl, thiocarbonyl, a carbamoyl, a thiocarbamoyl, a phoshoryl, an alkene, an alkyne, an halogen or a functional group-terminated linker that can be subsequently conjugated to a desired moiety selected from the group consisting of a fluorescent dye, a non-fluorescent label, a tag (for ¹⁴C, example biotin, avidin, streptavidin, or moiety containing an isotopic label such as ¹⁵N, ¹³C, deuterium, ³H, ³²P, ¹²⁵I and the like), an oligonucleotide (comprising deoxynucleotides and/or ribonucleotides, including an aptamer), an amino acid, a peptide, a protein, a sugar, an oligosaccharide, a steroid, a lipid, a folic acid, and a vitamin. The conjugation employs standard chemistry well-known in the art, including but not limited to coupling via N-hydroxysuccinimide, isothiocyanate, DCC (or DCI), and/or any other standard method as described in “Bioconjugate Techniques” by Greg T. Hermanson, Publisher Elsevier Science, 3^{rd} ed. (2013), the contents of which are incorporated herein by reference in its entirety.

### IV. Proteins for Modifying a Target Nucleic Acid

[0181] The present disclosure provides systems comprising a CRISPR nuclease that have utility in genome editing of eukaryotic cells. In some embodiments, the CRISPR nuclease employed in the genome editing systems is a Class 2, Type V nuclease. Although members of Class 2, Type V CRISPR-Cas systems have differences, they share some common characteristics that distinguish them from the Cas9 systems. Firstly, the Class 2, Type V nucleases possess a single RNA-guided RuvC domain-containing effector but no HNH domain, and they recognize T-rich PAM 5′ upstream to the target region on the non-targeted strand, which is different from Cas9 systems which rely on G-rich PAM at 3′ side of target sequences. Type V nucleases generate staggered double-stranded breaks distal to the PAM sequence, unlike Cas9, which generates a blunt end in the proximal site close to the PAM. In addition, Type V nucleases degrade ssDNA in trans when activated by target dsDNA or ssDNA binding in cis. In some embodiments, the Type V nucleases of the embodiments recognize a 5′-TC PAM motif and produce staggered ends cleaved solely by the RuvC domain. In some embodiments, the Type V nuclease is selected from the group consisting of Cas12a, Cas12b, Cas12c, Cas12d (CasY), CasZ and CasX. In some embodiments, the present disclosure provides systems comprising a CasX protein and one or more gNA acids (CasX:gNA system) that are specifically designed to modify a target nucleic acid sequence in eukaryotic cells.

[0182] The term “CasX protein”, as used herein, refers to a family of proteins, and encompasses all naturally occurring CasX proteins (“reference CasX”), proteins that share at least 50% identity to naturally occurring CasX proteins, as well as CasX variants possessing one or more improved characteristics relative to a naturally occurring CasX protein, described more fully, below.

[0183] Exemplary improved characteristics of the CasX variant embodiments include, but are not limited to improved folding of the variant, improved binding affinity to the gNA, improved binding affinity to the target nucleic acid, improved ability to utilize a greater spectrum of PAM sequences in the editing and/or binding of target DNA, improved unwinding of the target DNA, increased editing activity, improved editing efficiency, improved editing specificity, increased percentage of a eukaryotic genome that can be efficiently edited, increased activity of the nuclease, increased target strand loading for double strand cleavage, decreased target strand loading for single strand nicking, decreased off-target cleavage, improved binding of the non-target strand of DNA, improved target nucleic acid sequence cleavage rate, improved protein stability, improved protein:gNA (RNP) complex stability, improved protein solubility, improved ribonuclear protein complex (RNP) formation, higher percentage of cleavage-competent RNP, improved protein:gNA (RNP) complex solubility, improved protein yield, improved protein expression, and improved fusion characteristics, as described more fully, below. In some embodiments, the RNP of the CasX variant and the gNA variant exhibit one or more of the improved characteristics that are at least about 1.1 to about 100,000-fold improved relative to an RNP of the reference CasX protein of SEQ ID NO:1, SEQ ID NO:2, or SEQ ID NO:3 and the gNA of Table 1, when assayed in a comparable fashion. In other cases, the one or more improved characteristics of an RNP of the CasX variant and the gNA variant are at least about 1.1, at least about 10, at least about 100, at least about 1000, at least about 10,000, at least about 100,000-fold or more improved relative to an RNP of the reference CasX protein of SEQ ID NO:1, SEQ ID NO:2, or SEQ ID NO:3 and the gNA of Table 1. In other cases, the one or more of the improved characteristics of an RNP of the CasX variant and the gNA variant are about 1.1 to 100,00-fold, about 1.1 to 10,00-fold, about 1.1 to 1,000-fold, about 1.1 to 500-fold, about 1.1 to 100-fold, about 1.1 to 50-fold, about 1.1 to 20-fold, about 10 to 100,00-fold, about 10 to 10,00-fold, about 10 to 1,000-fold, about 10 to 500-fold, about 10 to 100-fold, about 10 to 50-fold, about 10 to 20-fold, about 2 to 70-fold, about 2 to 50-fold, about 2 to 30-fold, about 2 to 20-fold, about 2 to 10-fold, about 5 to 50-fold, about 5 to 30-fold, about 5 to 10-fold, about 100 to 100,00-fold, about 100 to 10,00-fold, about 100 to 1,000-fold, about 100 to 500-fold, about 500 to 100,00-fold, about 500 to 10,00-fold, about 500 to 1,000-fold, about 500 to 750-fold, about 1,000 to 100,00-fold, about 10,000 to 100,00-fold, about 20 to 500-fold, about 20 to 250-fold, about 20 to 200-fold, about 20 to 100-fold, about 20 to 50-fold, about 50 to 10,000-fold, about 50 to 1,000-fold, about 50 to 500-fold, about 50 to 200-fold, or about 50 to 100-fold, improved relative to an RNP of the reference CasX protein of SEQ ID NO:1, SEQ ID NO:2, or SEQ ID NO:3 and the gNA of Table 1, when assayed in a comparable fashion. In other cases, the one or more improved characteristics of an RNP of the CasX variant and the gNA variant are about 1.1-fold, 1.2-fold, 1.3-fold, 1.4-fold, 1.5-fold, 1.6-fold, 1.7-fold, 1.8-fold, 1.9-fold, 2-fold, 3-fold, 4-fold, 5-fold, 6-fold, 7-fold, 8-fold, 9-fold, 10-fold, 11-fold, 12-fold, 13-fold, 14-fold, 15-fold, 16-fold, 17-fold, 18-fold, 19-fold, 20-fold, 25-fold, 30-fold, 40-fold, 45-fold, 50-fold, 55-fold, 60-fold, 70-fold, 80-fold, 90-fold, 100-fold, 110-fold, 120-fold, 130-fold, 140-fold, 150-fold, 160-fold, 170-fold, 180-fold, 190-fold, 200-fold, 210-fold, 220-fold, 230-fold, 240-fold, 250-fold, 260-fold, 270-fold, 280-fold, 290-fold, 300-fold, 310-fold, 320-fold, 330-fold, 340-fold, 350-fold, 360-fold, 370-fold, 380-fold, 390-fold, 400-fold, 425-fold, 450-fold, 475-fold, or 500-fold improved relative to an RNP of the reference CasX protein of SEQ ID NO:1, SEQ ID NO:2, or SEQ ID NO:3 and the gNA of Table 1, when assayed in a comparable fashion. In a particular embodiment, an RNP of a CasX variant and gNA variant exhibits an increased cleavage rate of at least a 5-fold, at least a 10-fold, or at least a 30-fold increase in an in vitro assay compared to an RNP of the reference CasX proteins of SEQ ID NOS: 1-3 and reference gNAs of SEQ ID NO: 4 or SEQ ID NO: 5. Supportive data of such improvements are presented in the Examples, below.

[0184] The term “CasX variant” is inclusive of variants that are fusion proteins; i.e., the CasX is “fused to” a heterologous sequence. This includes CasX variants comprising CasX variant sequences and N-terminal, C-terminal, or internal fusions of the CasX to a heterologous protein or domain thereof.

[0185] CasX proteins of the disclosure comprise at least one of the following domains: a non-target strand binding (NTSB) domain, a target strand loading (TSL) domain, a helical I domain, a helical II domain, an oligonucleotide binding domain (OBD), and a RuvC DNA cleavage domain (the last of which may be modified or deleted in a catalytically dead CasX variant), described more fully, below. Additionally, the CasX variant proteins of the disclosure have an enhanced ability to efficiently edit and/or bind target DNA, when complexed with a gNA as an RNP, utilizing PAM TC motif, including PAM sequences selected from TTC, ATC, GTC, or CTC, compared to an RNP of a reference CasX protein and reference gNA. In the foregoing, the PAM sequence is located at least 1 nucleotide 5′ to the non-target strand of the protospacer having identity with the targeting sequence of the gNA in a assay system compared to the editing efficiency and/or binding of an RNP comprising a reference CasX protein and reference gNA in a comparable assay system. In one embodiment, an RNP of a CasX variant and gNA variant exhibits greater editing efficiency and/or binding of a target sequence in the target DNA compared to an RNP comprising a reference CasX protein and a reference gNA in a comparable assay system, wherein the PAM sequence of the target DNA is TTC. In another embodiment, an RNP of a CasX variant and gNA variant exhibits greater editing efficiency and/or binding of a target sequence in the target DNA compared to an RNP comprising a reference CasX protein and a reference gNA in a comparable assay system, wherein the PAM sequence of the target DNA is ATC. In another embodiment, an RNP of a CasX variant and gNA variant exhibits greater editing efficiency and/or binding of a target sequence in the target DNA compared to an RNP comprising a reference CasX protein and a reference gNA in a comparable assay system, wherein the PAM sequence of the target DNA is CTC. In another embodiment, an RNP of a CasX variant and gNA variant exhibits greater editing efficiency and/or binding of a target sequence in the target DNA compared to an RNP comprising a reference CasX protein and a reference gNA in a comparable assay system, wherein the PAM sequence of the target DNA is GTC. In the foregoing embodiments, the increased editing efficiency and/or binding affinity for the one or more PAM sequences is at least 1.5-fold greater or more compared to the editing efficiency and/or binding affinity of an RNP of any one of the CasX proteins of SEQ ID NOS:1-3 and the gNA of SEQ ID NOS: 4 and 5 of Table 1 for the PAM sequences.

[0186] In some embodiments, a CasX protein can bind and/or modify (e.g., cleave, nick, methylate, demethylate, etc.) a target nucleic acid and/or a polypeptide associated with target nucleic acid (e.g., methylation or acetylation of a histone tail). In some embodiments, the CasX protein is catalytically dead (dCasX) but retains the ability to bind a target nucleic acid. An exemplary catalytically dead CasX protein comprises one or more mutations in the active site of the RuvC domain of the CasX protein. In some embodiments, a catalytically dead CasX protein comprises substitutions at residues 672, 769 and/or 935 of SEQ ID NO:1. In one embodiment, a catalytically dead CasX protein comprises substitutions of D672A, E769A and/or D935A in a reference CasX protein of SEQ ID NO:1. In other embodiments, a catalytically dead CasX protein comprises substitutions at amino acids 659, 756 and/or 922 in a reference CasX protein of SEQ ID NO:2. In some embodiments, a catalytically dead CasX protein comprises D659A, E756A and/or D922A substitutions in a reference CasX protein of SEQ ID NO:2. In further embodiments, a catalytically dead CasX protein comprises deletions of all or part of the RuvC domain of the CasX protein. It will be understood that the same foregoing substitutions can similarly be introduced into the CasX variants of the disclosure, resulting in a dCasX variant. In one embodiment, all or a portion of the RuvC domain is deleted from the CasX variant, resulting in a dCasX variant. Catalytically inactive dCasX variant proteins can, in some embodiments, be used for base editing or epigenetic modifications. With a higher affinity for DNA, in some embodiments, catalytically inactive dCasX variant proteins can, relative to catalytically active CasX, find their target nucleic acid faster, remain bound to target nucleic acid for longer periods of time, bind target nucleic acid in a more stable fashion, or a combination thereof, thereby improving these functions of the catalytically dead CasX variant protein compared to a CasX variant that retains its cleavage capability.

[0187] a. Non-Target Strand Binding Domain

[0188] The reference CasX proteins of the disclosure comprise a non-target strand binding domain (NTSBD). The NTSBD is a domain not previously found in any Cas proteins; for example this domain is not present in Cas proteins such as Cas9, Cas12a/Cpf1, Cas13, Cas14, CASCADE, CSM, or CSY. Without being bound to theory or mechanism, a NTSBD in a CasX allows for binding to the non-target DNA strand and may aid in unwinding of the non-target and target strands. The NTSBD is presumed to be responsible for the unwinding, or the capture, of a non-target DNA strand in the unwound state. The NTSBD is in direct contact with the non-target strand in CryoEM model structures derived to date and may contain a non-canonical zinc finger domain. The NTSBD may also play a role in stabilizing DNA during unwinding, guide RNA invasion and R-loop formation. In some embodiments, an exemplary NTSBD comprises amino acids 101-191 of SEQ ID NO:1 or amino acids 103-192 of SEQ ID NO:2. In some embodiments, the NTSBD of a reference CasX protein comprises a four-stranded beta sheet.

[0189] b. Target Strand Loading Domain

[0190] The reference CasX proteins of the disclosure comprise a Target Strand Loading (TSL) domain. The TSL domain is a domain not found in certain Cas proteins such as Cas9, CASCADE, CSM, or CSY. Without wishing to be bound by theory or mechanism, it is thought that the TSL domain is responsible for aiding the loading of the target DNA strand into the RuvC active site of a CasX protein. In some embodiments, the TSL acts to place or capture the target-strand in a folded state that places the scissile phosphate of the target strand DNA backbone in the RuvC active site. The TSL comprises a cys4 (CXXC, CXXC zinc finger/ribbon domain (SEQ ID NO: 48) that is separated by the bulk of the TSL. In some embodiments, an exemplary TSL comprises amino acids 825-934 of SEQ ID NO:1 or amino acids 813-921 of SEQ ID NO:2.

[0191] c. Helical I Domain

[0192] The reference CasX proteins of the disclosure comprise a helical I domain. Certain Cas proteins other than CasX have domains that may be named in a similar way. However, in some embodiments, the helical I domain of a CasX protein comprises one or more unique structural features, or comprises a unique sequence, or a combination thereof, compared to non-CasX proteins. For example, in some embodiments, the helical I domain of a CasX protein comprises one or more unique secondary structures compared to domains in other Cas proteins that may have a similar name. For example, in some embodiments the helical I domain in a CasX protein comprises one or more alpha helices of unique structure and sequence in arrangement, number and length compared to other CRISPR proteins. In certain embodiments, the helical I domain is responsible for interacting with the bound DNA and spacer of the guide RNA. Without wishing to be bound by theory, it is thought that in some cases the helical I domain may contribute to binding of the protospacer adjacent motif (PAM). In some embodiments, an exemplary helical I domain comprises amino acids 57-100 and 192-332 of SEQ ID NO:1, or amino acids 59-102 and 193-333 of SEQ ID NO:2. In some embodiments, the helical I domain of a reference CasX protein comprises one or more alpha helices.

[0193] d. Helical II Domain

[0194] The reference CasX proteins of the disclosure comprise a helical II domain. Certain Cas proteins other than CasX have domains that may be named in a similar way. However, in some embodiments, the helical II domain of a CasX protein comprises one or more unique structural features, or a unique sequence, or a combination thereof, compared to domains in other Cas proteins that may have a similar name. For example, in some embodiments, the helical II domain comprises one or more unique structural alpha helical bundles that align along the target DNA:guide RNA channel. In some embodiments, in a CasX comprising a helical II domain, the target strand and guide RNA interact with helical II (and the helical I domain, in some embodiments) to allow RuvC domain access to the target DNA. The helical II domain is responsible for binding to the guide RNA scaffold stem loop as well as the bound DNA. In some embodiments, an exemplary helical II domain comprises amino acids 333-509 of SEQ ID NO:1, or amino acids 334-501 of SEQ ID NO:2.

[0195] e. Oligonucleotide Binding Domain

[0196] The reference CasX proteins of the disclosure comprise an Oligonucleotide Binding Domain (OBD). Certain Cas proteins other than CasX have domains that may be named in a similar way. However, in some embodiments, the OBD comprises one or more unique functional features, or comprises a sequence unique to a CasX protein, or a combination thereof. For example, in some embodiments the bridged helix (BH), helical I domain, helical II domain, and Oligonucleotide Binding Domain (OBD) together are responsible for binding of a CasX protein to the guide RNA. Thus, for example, in some embodiments the OBD is unique to a CasX protein in that it interacts functionally with a helical I domain, or a helical II domain, or both, each of which may be unique to a CasX protein as described herein. Specifically, in CasX the OBD largely binds the RNA triplex of the guide RNA scaffold. The OBD may also be responsible for binding to the protospacer adjacent motif (PAM). An exemplary OBD domain comprises amino acids 1-56 and 510-660 of SEQ ID NO:1, or amino acids 1-58 and 502-647 of SEQ ID NO:2.

[0197] f. RuvC DNA Cleavage Domain

[0198] The reference CasX proteins of the disclosure comprise a RuvC domain, that includes 2 partial RuvC domains (RuvC-I and RuvC-II). The RuvC domain is the ancestral domain of all type 12 CRISPR proteins. The RuvC domain originates from a TNPB (transposase B) like transposase. Similar to other RuvC domains, the CasX RuvC domain has a DED catalytic triad that is responsible for coordinating a magnesium (Mg) ion and cleaving DNA. In some embodiments, the RuvC has a DED motif active site that is responsible for cleaving both strands of DNA (one by one, most likely the non-target strand first at 11-14 nucleotides (nt) into the targeted sequence and then the target strand next at 2-4 nucleotides after the target sequence). Specifically in CasX, the RuvC domain is unique in that it is also responsible for binding the guide RNA scaffold stem loop that is critical for CasX function. An exemplary RuvC domain comprises amino acids 661-824 and 935-986 of SEQ ID NO:1, or amino acids 648-812 and 922-978 of SEQ ID NO:2.

[0199] g. Reference CasX Proteins

[0200] The disclosure provides naturally-occurring CasX proteins (referred to herein as a “reference CasX protein”) that function as an endonuclease that catalyzes a double strand break at a specific sequence in a targeted double-stranded DNA (dsDNA). The sequence specificity is provided by the targeting sequence of the associated gNA to which it is complexed, which hybridizes to a target sequence within the target nucleic acid. For example, reference CasX proteins can be isolated from naturally occurring prokaryotes, such as Deltaproteobacteria, Planctomycetes, or Candidatus Sungbacteria species. A reference CasX protein (sometimes referred to herein as a reference CasX protein) is a Type V CRISPR/Cas endonuclease belonging to the CasX (sometimes referred to as Cas12e) family of proteins that is capable of interacting with a guide NA to form a ribonucleoprotein (RNP) complex. In some embodiments, the RNP complex comprising the reference CasX protein can be targeted to a particular site in a target nucleic acid via base pairing between the targeting sequence (or spacer) of the gNA and a target sequence in the target nucleic acid. In some embodiments, the RNP comprising the reference CasX protein is capable of cleaving target DNA. In some embodiments, the RNP comprising the reference CasX protein is capable of nicking target DNA. In some embodiments, the RNP comprising the reference CasX protein is capable of editing target DNA, for example in those embodiments where the reference CasX protein is capable of cleaving or nicking DNA, followed by non-homologous end joining (NHEJ), homology-directed repair (HDR), homology-independent targeted integration (HITI), micro-homology mediated end joining (MMEJ), single strand annealing (SSA) or base excision repair (BER). In some embodiments, the RNP comprising the CasX protein is a catalytically dead (is catalytically inactive or has substantially no cleavage activity) CasX protein (dCasX), but retains the ability to bind the target DNA, described more fully, supra.

[0201] In some cases, a Type V reference CasX protein is isolated or derived from Deltaproteobacteria. In some embodiments, a CasX protein comprises a sequence at least 50% identical, at least 60% identical, at least 65% identical, at least 70% identical, at least 75% identical, at least 80% identical, at least 81% identical, at least 82% identical, at least 83% identical, at least 84% identical, at least 85% identical, at least 86% identical, at least 86% identical, at least 87% identical, at least 88% identical, at least 89% identical, at least 89% identical, at least 90% identical, at least 91% identical, at least 92% identical, at least 93% identical, at least 94% identical, at least 95% identical, at least 96% identical, at least 97% identical, at least 98% identical, at least 99% identical, at least 99.5% identical or 100% identical to a sequence of:

```
(SEQ ID NO: 1)
  1 MEKRINKIRK KLSADNATKP VSRSGPMKTL
      LVRVMTDDLK KRLEKRRKKP EVMPQVISNN
  61 AANNLRMLLD DYTKMKEAIL QVYWQEFKDD
        HVGLMCKFAQ PASKKIDQNK LKPEMDEKGN
121 LTTAGFACSQ CGQPLFVYKL EQVSEKGKAY
        TNYFGRCNVA EHEKLILLAQ LKPEKDSDEA
181 VTYSLGKFGQ RALDFYSIHV TKESTHPVKP
        LAQIAGNRYA SGPVGKALSD ACMGTIASFL
241 SKYQDIIIEH QKVVKGNQKR LESLRELAGK
        ENLEYPSVTL PPQPHTKEGV DAYNEVIARV
301 RMWVNLNLWQ KLKLSRDDAK PLLRLKGFPS
        FPVVERRENE VDWWNTINEV KKLIDAKRDM
361 GRVFWSGVTA EKRNTILEGY NYLPNENDHK
        KREGSLENPK KPAKRQFGDL LLYLEKKYAG
421 DWGKVFDEAW ERIDKKIAGL TSHIEREEAR
        NAEDAQSKAV LTDWLRAKAS FVLERLKEMD
481 EKEFYACEIQ LQKWYGDLRG NPFAVEAENR
        VVDISGFSIG SDGHSIQYRN LLAWKYLENG
541 KREFYLLMNY GKKGRIRFTD GTDIKKSGKW
        QGLLYGGGKA KVIDLTFDPD DEQLIILPLA
601 FGTRQGREFI WNDLLSLETG LIKLANGRVI
        EKTIYNKKIG RDEPALFVAL TFERREVVDP
661 SNIKPVNLIG VDRGENIPAV IALTDPEGCP
        LPEFKDSSGG PTDILRIGEG YKEKQRAIQA
721 AKEVEQRRAG GYSRKFASKS RNLADDMVRN
        SARDLFYHAV THDAVLVFEN LSRGFGRQGK
781 RTFMTERQYT KMEDWLTAKL AYEGLTSKTY
        LSKTLAQYTS KTCSNCGFTI TTADYDGMLV
841 RLKKTSDGWA TTLNNKELKA EGQITYYNRY
        KRQTVEKELS AELDRLSEES GNNDISKWTK
901 GRRDEALFLL KKRFSHRPVQ EQFVCLDCGH
        EVHADEQAAL NIARSWLFLN SNSTEFKSYK
961 SGKQPFVGAW QAFYKRRLKE VWKPNA.
```

[0202] In some cases, a Type V reference CasX protein is isolated or derived from Planctomycetes. In some embodiments, a CasX protein comprises a sequence at least 50% identical, at least 60% identical, at least 65% identical, at least 70% identical, at least 75% identical, at least 80% identical, at least 81% identical, at least 82% identical, at least 83% identical, at least 84% identical, at least 85% identical, at least 86% identical, at least 86% identical, at least 87% identical, at least 88% identical, at least 89% identical, at least 89% identical, at least 90% identical, at least 91% identical, at least 92% identical, at least 93% identical, at least 94% identical, at least 95% identical, at least 96% identical, at least 97% identical, at least 98% identical, at least 99% identical, at least 99.5% identical or 100% identical to a sequence of:

```
(SEQ ID NO: 2)
  1 MQEIKRINKI RRRLVKDSNT KKAGKTGPMK
        TLLVRVMTPD LRERLENLRK KPENIPQPIS
  61 NTSRANLNKL LTDYTEMKKA ILHVYWEEFQ
        KDPVGLMSRV AQPAPKNIDQ RKLIPVKDGN
121 ERLTSSGFAC SQCCQPLYVY KLEQVNDKGK
        PHTNYFGRCN VSEHERLILL SPHKPEANDE
181 LVTYSLGKFG QRALDFYSIH VTRESNHPVK
        PLEQIGGNSC ASGPVGKALS DACMGAVASF
241 LTKYQDIIIE HQKVIKKNEK RLANLKDIAS
        ANGLAFPKIT LPPQPHTKEG IEAYNNVVAQ
301 IVIWVNLNLW QKLKIGRDEA KPLQRLKGFP
        SFPLVERQAN EVDWWDMVCN VKKLINEKKE
361 DGKVFWQNLA GYKRQEALLP YLSSEEDRKK
        GKKFARYQFG DLLLHLEKKH GEDWGKVYDE
421 AWERIDKKVE GLSKHIKLEE ERRSEDAQSK
        AALTDWLRAK ASFVIEGLKE ADKDEFORCE
481 LKLQKWYGDL RGKPFAIEAE NSILDISGFS
        KQYNCAFIWQ KDGVKKLNLY LIINYFKGGK
541 LRFKKIKPEA FEANRFYTVI NKKSGEIVPM
        EVNFNFDDPN LIILPLAFGK RQGREFIWND
601 LLSLETGSLK LANGRVIEKT LYNRRTRQDE
        PALFVALTFE RREVLDSSNI KPMNLIGIDR
661 GENIPAVIAL TDPEGCPLSR FKDSLGNPTH
        ILRIGESYKE KQRTIQAAKE VEQRRAGGYS
721 RKYASKAKNL ADDMVRNTAR DLLYYAVTQD
        AMLIFENLSR GFGRQGKRTF MAERQYTRME
781 DWLTAKLAYE GLPSKTYLSK TLAQYTSKTC
        SNCGFTITSA DYDRVLEKLK KTATGWMTTI
841 NGKELKVEGQ ITYYNRYKRQ NVVKDLSVEL
        DRLSEESVNN DISSWTKGRS GEALSLLKKR
901 FSHRPVQEKF VCLNCGFETH ADEQAALNIA
        RSWLFLRSQE YKKYQTNKTT GNTDKRAFVE
961 TWQSFYRKKL KEVWKPAV.
```

[0203] In some embodiments, the CasX protein comprises the sequence of SEQ ID NO: 2, or at least 60% similarity thereto. In some embodiments, the CasX protein comprises the sequence of SEQ ID NO: 2, or at least 80% similarity thereto. In some embodiments, the CasX protein comprises the sequence of SEQ ID NO: 2, or at least 90% similarity thereto. In some embodiments, the CasX protein comprises the sequence of SEQ ID NO: 2, or at least 95% similarity thereto. In some embodiments, the CasX protein consists of the sequence of SEQ ID NO: 2. In some embodiments, the CasX protein comprises or consists of a sequence that has at least 1, at least 2, at least 3, at least 4, at least 5, at least 6, at least 7, at least 8, at least 9, at least 10, at least 20, at least 30, at least 40 or at least 50 mutations relative to the sequence of SEQ ID NO: 2. These mutations can be insertions, deletions, amino acid substitutions, or any combinations thereof.

[0204] In some cases, a Type V reference CasX protein is isolated or derived from Candidatus Sungbacteria. In some embodiments, a CasX protein comprises a sequence at least 50% identical, at least 60% identical, at least 65% identical, at least 70% identical, at least 75% identical, at least 80% identical, at least 81% identical, at least 82% identical, at least 83% identical, at least 84% identical, at least 85% identical, at least 86% identical, at least 86% identical, at least 87% identical, at least 88% identical, at least 89% identical, at least 89% identical, at least 90% identical, at least 91% identical, at least 92% identical, at least 93% identical, at least 94% identical, at least 95% identical, at least 96% identical, at least 97% identical, at least 98% identical, at least 99% identical, at least 99.5% identical or 100% identical to a sequence of

```
(SEQ ID NO: 3)
  1 MDNANKPSTK SLVNTTRISD HFGVTPGQVT
        RVFSFGIIPT KRQYAIIERW FAAVEAARER
  61 LYGMLYAHFQ ENPPAYLKEK FSYETFFKGR
        PVLNGLRDID PTIMTSAVFT ALRHKAEGAM
121 AAFHTNHRRL FEEARKKMRE YAECLKANEA
        LLRGAADIDW DKIVNALRTR LNTCLAPEYD
181 AVIADFGALC AFRALIAETN ALKGAYNHAL
        NQMLPALVKV DEPEEAEESP RLRFFNGRIN
241 DLPKFPVAER ETPPDTETII RQLEDMARVI
        PDTAEILGYI HRIRHKAARR KPGSAVPLPQ
301 RVALYCAIRM ERNPEEDPST VAGHFLGEID
        RVCEKRRQGL VRTPFDSQIR ARYMDIISFR
361 ATLAHPDRWT EIQFLRSNAA SRRVRAETIS
        APFEGFSWTS NRTNPAPQYG MALAKDANAP
421 ADAPELCICL SPSSAAFSVR EKGGDLIYMR
        PTGGRRGKDN PGKEITWVPG SFDEYPASGV
481 ALKLRLYFGR SQARRMLTNK TWGLLSDNPR
        VFAANAELVG KKRNPQDRWK LFFHMVISGP
541 PPVEYLDFSS DVRSRARTVI GINRGEVNPL
        AYAVVSVEDG QVLEEGLLGK KEYIDQLIET
601 RRRISEYQSR EQTPPRDLRQ RVRHLQDTVL
        GSARAKIHSL IAFWKGILAI ERLDDQFHGR
661 EQKIIPKKTY LANKTGFMNA LSFSGAVRVD
        KKGNPWGGMI EIYPGGISRT CTQCGTVWLA
721 RRPKNPGHRD AMVVIPDIVD DAAATGFDNV
        DCDAGTVDYG ELFTLSREWV RLTPRYSRVM
781 RGTLGDLERA IRQGDDRKSR QMLELALEPQ
        PQWGQFFCHR CGFNGQSDVL AATNLARRAI
841 SLIRRLPDTD TPPTP.
```

[0205] In some embodiments, the CasX protein comprises the sequence of SEQ ID NO: 3, or at least 60% similarity thereto. In some embodiments, the CasX protein comprises the sequence of SEQ ID NO: 3, or at least 80% similarity thereto. In some embodiments, the CasX protein comprises the sequence of SEQ ID NO: 3, or at least 90% similarity thereto. In some embodiments, the CasX protein comprises the sequence of SEQ ID NO: 3, or at least 95% similarity thereto. In some embodiments, the CasX protein consists of the sequence of SEQ ID NO: 3. In some embodiments, the CasX protein comprises or consists of a sequence that has at least 1, at least 2, at least 3, at least 4, at least 5, at least 6, at least 7, at least 8, at least 9, at least 10, at least 20, at least 30, at least 40 or at least 50 mutations relative to the sequence of SEQ ID NO: 3. These mutations can be insertions, deletions, amino acid substitutions, or any combinations thereof.

[0206] h. CasX Variant Proteins

[0207] The present disclosure provides variants of a reference CasX protein (interchangeably referred to herein as “CasX variant” or “CasX variant protein”), wherein the CasX variants comprise at least one sequence modification in at least one domain relative to a reference CasX protein, including the sequences of SEQ ID NOS:1-3. In some embodiments, the CasX variant exhibits at least one improved characteristic compared to the reference CasX protein. All variants that improve one or more functions or characteristics of the CasX variant protein when compared to a reference CasX protein described herein are envisaged as being within the scope of the disclosure. In some embodiments, the modification is a mutation in one or more amino acids of the reference CasX. In other embodiments, the modification is a substitution of one or more domains of the reference CasX with one or more domains from a different CasX. In some embodiments, insertion includes the insertion of a part or all of a domain from a different CasX protein. Mutations can occur in any one or more domains of the reference CasX protein, and may include, for example, deletion of part or all of one or more domains, or one or more amino acid substitutions, deletions, or insertions in any domain of the reference CasX protein. The domains of CasX proteins include the non-target strand binding (NTSB) domain, the target strand loading (TSL) domain, the helical I domain, the helical II domain, the oligonucleotide binding domain (OBD), and the RuvC DNA cleavage domain. Any change in amino acid sequence of a reference CasX protein that leads to an improved characteristic of the CasX protein is considered a CasX variant protein of the disclosure. For example, CasX variants can comprise one or more amino acid substitutions, insertions, deletions, or swapped domains, or any combinations thereof, relative to a reference CasX protein sequence. In a particular feature, the CasX variant proteins of the disclosure have advantages over reference CasX proteins in that they have binding affinity for a greater diversity of PAM sequences, selected from TTC, ATC, GTC, or CTC, which enables the CasX variants to edit a significantly greater portion of the target nucleic acid compared to reference CasX proteins.

[0208] In some embodiments, the CasX variant protein comprises at least one modification in at least each of two domains of the reference CasX protein, including the sequences of SEQ ID NOS: 1-3. In some embodiments, the CasX variant protein comprises at least one modification in at least 2 domains, in at least 3 domains, at least 4 domains or at least 5 domains of the reference CasX protein. In some embodiments, the CasX variant protein comprises two or more modifications in at least one domain of the reference CasX protein. In some embodiments, the CasX variant protein comprises at least two modifications in at least one domain of the reference CasX protein, at least three modifications in at least one domain of the reference CasX protein or at least four modifications in at least one domain of the reference CasX protein. In some embodiments, wherein the CasX variant comprises two or more modifications compared to a reference CasX protein, each modification is made in a domain independently selected from the group consisting of a NTSBD, TSLD, Helical I domain, Helical II domain, OBD, and RuvC DNA cleavage domain.

[0209] In some embodiments, the at least one modification of the CasX variant protein comprises a deletion of at least a portion of one domain of the reference CasX protein of SEQ ID NOS: 1-3. In some embodiments, the deletion is in the NTSBD, TSLD, Helical I domain, Helical II domain, OBD, or RuvC DNA cleavage domain.

[0210] Suitable mutagenesis methods for generating CasX variant proteins of the disclosure may include, for example, Deep Mutational Evolution (DME), deep mutational scanning (DMS), error prone PCR, cassette mutagenesis, random mutagenesis, staggered extension PCR, gene shuffling, or domain swapping. In some embodiments, the CasX variants are designed, for example by selecting one or more desired mutations in a reference CasX. In certain embodiments, the activity of a reference CasX protein is used as a benchmark against which the activity of one or more CasX variants are compared, thereby measuring improvements in function of the CasX variants. Exemplary improvements of CasX variants include, but are not limited to, improved folding of the variant, improved binding affinity to the gNA, improved binding affinity to the target DNA, altered binding affinity to one or more PAM sequences, improved unwinding of the target DNA, increased activity, improved editing efficiency, improved editing specificity, increased activity of the nuclease, increased target strand loading for double strand cleavage, decreased target strand loading for single strand nicking, decreased off-target cleavage, improved binding of the non-target strand of DNA, improved target nucleic acid sequence cleavage rate, improved protein stability, improved protein:gNA complex stability, improved protein solubility, improved protein:gNA complex solubility, improved protein yield, improved protein expression, and improved fusion characteristics, as described more fully, below.

[0211] In some embodiments of the CasX variants described herein, the at least one modification comprises: (a) a substitution of 1 to 100 consecutive or non-consecutive amino acids in the CasX variant compared to a reference CasX of SEQ ID NO:1, SEQ ID NO:2, or SEQ ID NO:3; (b) a deletion of 1 to 100 consecutive or non-consecutive amino acids in the CasX variant compared to a reference CasX; (c) an insertion of 1 to 100 consecutive or non-consecutive amino acids in the CasX compared to a reference CasX; or (d) any combination of (a)-(c). In some embodiments, the at least one modification comprises: (a) a substitution of 5-10 consecutive or non-consecutive amino acids in the CasX variant compared to a reference CasX of SEQ ID NO:1, SEQ ID NO:2, or SEQ ID NO:3; (b) a deletion of 1-5 consecutive or non-consecutive amino acids in the CasX variant compared to a reference CasX; (c) an insertion of 1-5 consecutive or non-consecutive amino acids in the CasX compared to a reference CasX; or (d) any combination of (a)-(c).

[0212] In some embodiments, the CasX variant protein comprises or consists of a sequence that has at least 1, at least 2, at least 3, at least 4, at least 5, at least 6, at least 7, at least 8, at least 9, at least 10, at least 20, at least 30, at least 40 or at least 50 mutations relative to the sequence of SEQ ID NO:1, SEQ ID NO:2, or SEQ ID NO:3. These mutations can be insertions, deletions, amino acid substitutions, or any combinations thereof.

[0213] In some embodiments, the CasX variant protein comprises at least one amino acid substitution in at least one domain of a reference CasX protein. In some embodiments, the CasX variant protein comprises at least about 1-4 amino acid substitutions, 1-10 amino acid substitutions, 1-20 amino acid substitutions, 1-30 amino acid substitutions, 1-40 amino acid substitutions, 1-50 amino acid substitutions, 1-60 amino acid substitutions, 1-70 amino acid substitutions, 1-80 amino acid substitutions, 1-90 amino acid substitutions, 1-100 amino acid substitutions, 2-10 amino acid substitutions, 2-20 amino acid substitutions, 2-30 amino acid substitutions, 3-10 amino acid substitutions, 3-20 amino acid substitutions, 3-30 amino acid substitutions, 4-10 amino acid substitutions, 4-20 amino acid substitutions, 3-300 amino acid substitutions, 5-10 amino acid substitutions, 5-20 amino acid substitutions, 5-30 amino acid substitutions, 10-50 amino acid substitutions, or 20-50 amino acid substitutions, relative to a reference CasX protein, which can be consecutive or non-consecutive, or in different domains. As used herein “consecutive amino acids” refer to amino acids that are contiguous in the primary sequence of a polypeptide. In some embodiments, the CasX variant protein comprises at least about 100 or more amino acid substitutions relative to a reference CasX protein. In some embodiments, the amino acid substitutions are conservative substitutions. In other embodiments, the substitutions are non-conservative; e.g., a polar amino acid is substituted for a non-polar amino acid, or vice versa.

[0214] Any amino acid can be substituted for any other amino acid in the substitutions described herein. The substitution can be a conservative substitution (e.g., a basic amino acid is substituted for another basic amino acid). The substitution can be a non-conservative substitution (e.g., a basic amino acid is substituted for an acidic amino acid or vice versa). For example, a proline in a reference CasX protein can be substituted for any of arginine, histidine, lysine, aspartic acid, glutamic acid, serine, threonine, asparagine, glutamine, cysteine, glycine, alanine, isoleucine, leucine, methionine, phenylalanine, tryptophan, tyrosine or valine to generate a CasX variant protein of the disclosure.

[0215] In some embodiments, a CasX variant protein comprises at least one amino acid deletion relative to a reference CasX protein. In some embodiments, a CasX variant protein comprises a deletion of 1-4 amino acids, 1-10 amino acids, 1-20 amino acids, 1-30 amino acids, 1-40 amino acids, 1-50 amino acids, 1-60 amino acids, 1-70 amino acids, 1-80 amino acids, 1-90 amino acids, 1-100 amino acids, 2-10 amino acids, 2-20 amino acids, 2-30 amino acids, 3-10 amino acids, 3-20 amino acids, 3-30 amino acids, 4-10 amino acids, 4-20 amino acids, 3-300 amino acids, 5-10 amino acids, 5-20 amino acids, 5-30 amino acids, 10-50 amino acids or 20-50 amino acids relative to a reference CasX protein. In some embodiments, a CasX protein comprises a deletion of at least about 100 consecutive amino acids relative to a reference CasX protein. In some embodiments, a CasX variant protein comprises a deletion of at least 1, 2, 3, 4, 5, 6, 7, 8, 9, 10, 20, 30, 40, 50 or 100 consecutive amino acids relative to a reference CasX protein. In some embodiments, a CasX variant protein comprises a deletion of 1, 2, 3, 4, 5, 6, 7, 8, 9 or 10 consecutive amino acids.

[0216] In some embodiments, a CasX variant protein comprises two or more deletions relative to a reference CasX protein, and the two or more deletions are not consecutive amino acids. For example, a first deletion may be in a first domain of the reference CasX protein, and a second deletion may be in a second domain of the reference CasX protein. In some embodiments, a CasX variant protein comprises 2, 3, 4, 5, 6, 7, 8, 9, 10, 11, 12, 13, 14, 15, 16, 17, 18, 19 or 20 non-consecutive deletions relative to a reference CasX protein. In some embodiments, a CasX variant protein comprises at least 20 non-consecutive deletions relative to a reference CasX protein. Each non-consecutive deletion may be of any length of amino acids described herein, e.g., 1-4 amino acids, 1-10 amino acids, and the like.

[0217] In some embodiments, the CasX variant protein comprises at least one amino acid insertion relative to the sequence of SEQ ID NO:1, SEQ ID NO: 2, or SEQ ID NO: 3. In some embodiments, a CasX variant protein comprises an insertion of 1 amino acid, an insertion of 2-3 consecutive amino acids, 2-4 consecutive amino acids, 2-5 consecutive amino acids, 2-6 consecutive amino acids, 2-7 consecutive amino acids, 2-8 consecutive amino acids, 2-9 consecutive amino acids, 2-10 consecutive amino acids, 2-20 consecutive amino acids, 2-30 consecutive amino acids, 2-40 consecutive amino acids, 2-50 consecutive amino acids, 2-60 consecutive amino acids, 2-70 consecutive amino acids, 2-80 consecutive amino acids, 2-90 consecutive amino acids, 2-100 consecutive amino acids, 3-10 consecutive amino acids, 3-20 consecutive amino acids, 3-30 consecutive amino acids, 4-10 consecutive amino acids, 4-20 consecutive amino acids, 3-300 consecutive amino acids, 5-10 consecutive amino acids, 5-20 consecutive amino acids, 5-30 consecutive amino acids, 10-50 consecutive amino acids or 20-50 consecutive amino acids relative to a reference CasX protein. In some embodiments, the CasX variant protein comprises an insertion of 2, 3, 4, 5, 6, 7, 8, 9, 10, 11, 12, 13, 14, 15, 16, 17, 18, 19 or 20 consecutive amino acids. In some embodiments, a CasX variant protein comprises an insertion of at least about 100 consecutive amino acids.

[0218] In some embodiments, a CasX variant protein comprises two or more insertions relative to a reference CasX protein, and the two or more insertions are not consecutive amino acids of the sequence. For example, a first insertion may be in a first domain of the reference CasX protein, and a second insertion may be in a second domain of the reference CasX protein. In some embodiments, a CasX variant protein comprises 2, 3, 4, 5, 6, 7, 8, 9, 10, 11, 12, 13, 14, 15, 16, 17, 18, 19 or 20 non-consecutive insertions relative to a reference CasX protein. In some embodiments, a CasX variant protein comprises at least 10 to about 20 or more non-consecutive insertions relative to a reference CasX protein. Each non-consecutive insertion may be of any length of amino acids described herein, e.g., 1-4 amino acids, 1-10 amino acids, and the like.

[0219] Any amino acid, or combination of amino acids, can be inserted in the insertions described herein. For example, a proline, arginine, histidine, lysine, aspartic acid, glutamic acid, serine, threonine, asparagine, glutamine, cysteine, glycine, alanine, isoleucine, leucine, methionine, phenylalanine, tryptophan, tyrosine or valine or any combination thereof can be inserted into a reference CasX protein of the disclosure to generate a CasX variant protein.

[0220] Any permutation of the substitution, insertion and deletion embodiments described herein can be combined to generate a CasX variant protein of the disclosure. For example, a CasX variant protein can comprise at least one substitution and at least one deletion relative to a reference CasX protein sequence, at least one substitution and at least one insertion relative to a reference CasX protein sequence, at least one insertion and at least one deletion relative to a reference CasX protein sequence, or at least one substitution, one insertion and one deletion relative to a reference CasX protein sequence.

[0221] In some embodiments, the CasX variant protein has at least about 60% sequence similarity, at least 70% similarity, at least 80% similarity, at least 85% similarity, at least 86% similarity, at least 87% similarity, at least 88% similarity, at least 89% similarity, at least 90% similarity, at least 91% similarity, at least 92% similarity, at least 93% similarity, at least 94% similarity, at least 95% similarity, at least 96% similarity, at least 97% similarity, at least 98% similarity, at least 99% similarity, at least 99.5% similarity, at least 99.6% similarity, at least 99.7% similarity, at least 99.8% similarity or at least 99.9% similarity to one of SEQ ID NO: 1, SEQ ID NO: 2, or SEQ ID NO: 3.

[0222] In some embodiments, the CasX variant protein has at least about 60% sequence similarity to SEQ ID NO: 2 or a portion thereof. In some embodiments, the CasX variant protein comprises a substitution of Y789T of SEQ ID NO: 2, a deletion of P793 of SEQ ID NO: 2, a substitution of Y789D of SEQ ID NO: 2, a substitution of T72S of SEQ ID NO: 2, a substitution of I546V of SEQ ID NO: 2, a substitution of E552A of SEQ ID NO: 2, a substitution of A636D of SEQ ID NO: 2, a substitution of F536S of SEQ ID NO:2, a substitution of A708K of SEQ ID NO: 2, a substitution of Y797L of SEQ ID NO: 2, a substitution of L792G SEQ ID NO: 2, a substitution of A739V of SEQ ID NO: 2, a substitution of G791M of SEQ ID NO: 2, an insertion of A at position 661 of SEQ ID NO: 2, a substitution of A788W of SEQ ID NO: 2, a substitution of K390R of SEQ ID NO: 2, a substitution of A751S of SEQ ID NO: 2, a substitution of E385A of SEQ ID NO: 2, an insertion of P at position 696 of SEQ ID NO: 2, an insertion of M at position 773 of SEQ ID NO: 2, a substitution of G695H of SEQ ID NO: 2, an insertion of AS at position 793 of SEQ ID NO: 2, an insertion of AS at position 795 of SEQ ID NO: 2, a substitution of C477R of SEQ ID NO: 2, a substitution of C477K of SEQ ID NO: 2, a substitution of C479A of SEQ ID NO: 2, a substitution of C479L of SEQ ID NO: 2, a substitution of I55F of SEQ ID NO: 2, a substitution of K210R of SEQ ID NO: 2, a substitution of C233S of SEQ ID NO: 2, a substitution of D231N of SEQ ID NO: 2, a substitution of Q338E of SEQ ID NO: 2, a substitution of Q338R of SEQ ID NO: 2, a substitution of L379R of SEQ ID NO: 2, a substitution of K390R of SEQ ID NO: 2, a substitution of L481Q of SEQ ID NO: 2, a substitution of F495S of SEQ ID NO:2, a substitution of D600N of SEQ ID NO: 2, a substitution of T886K of SEQ ID NO: 2, a substitution of A739V of SEQ ID NO: 2, a substitution of K460N of SEQ ID NO: 2, a substitution of I199F of SEQ ID NO: 2, a substitution of G492P of SEQ ID NO: 2, a substitution of T1531 of SEQ ID NO: 2, a substitution of R591I of SEQ ID NO: 2, an insertion of AS at position 795 of SEQ ID NO: 2, an insertion of AS at position 796 of SEQ ID NO:2, an insertion of L at position 889 of SEQ ID NO: 2, a substitution of E121D of SEQ ID NO: 2, a substitution of S270W of SEQ ID NO: 2, a substitution of E712Q of SEQ ID NO: 2, a substitution of K942Q of SEQ ID NO: 2, a substitution of E552K of SEQ ID NO:2, a substitution of K25Q of SEQ ID NO: 2, a substitution of N47D of SEQ ID NO: 2, an insertion of T at position 696 of SEQ ID NO: 2, a substitution of L685I of SEQ ID NO: 2, a substitution of N880D of SEQ ID NO: 2, a substitution of Q102R of SEQ ID NO: 2, a substitution of M734K of SEQ ID NO: 2, a substitution of A724S of SEQ ID NO: 2, a substitution of T704K of SEQ ID NO: 2, a substitution of P224K of SEQ ID NO: 2, a substitution of K25R of SEQ ID NO: 2, a substitution of M29E of SEQ ID NO: 2, a substitution of H152D of SEQ ID NO: 2, a substitution of S219R of SEQ ID NO: 2, a substitution of E475K of SEQ ID NO: 2, a substitution of G226R of SEQ ID NO: 2, a substitution of A377K of SEQ ID NO: 2, a substitution of E480K of SEQ ID NO: 2, a substitution of K416E of SEQ ID NO: 2, a substitution of H164R of SEQ ID NO: 2, a substitution of K767R of SEQ ID NO: 2, a substitution of I7F of SEQ ID NO: 2, a substitution of M29R of SEQ ID NO: 2, a substitution of H435R of SEQ ID NO: 2, a substitution of E385Q of SEQ ID NO: 2, a substitution of E385K of SEQ ID NO: 2, a substitution of I279F of SEQ ID NO: 2, a substitution of D489S of SEQ ID NO: 2, a substitution of D732N of SEQ ID NO: 2, a substitution of A739T of SEQ ID NO: 2, a substitution of W885R of SEQ ID NO: 2, a substitution of E53K of SEQ ID NO: 2, a substitution of A238T of SEQ ID NO: 2, a substitution of P283Q of SEQ ID NO: 2, a substitution of E292K of SEQ ID NO: 2, a substitution of Q628E of SEQ ID NO: 2, a substitution of R388Q of SEQ ID NO: 2, a substitution of G791M of SEQ ID NO: 2, a substitution of L792K of SEQ ID NO: 2, a substitution of L792E of SEQ ID NO: 2, a substitution of M779N of SEQ ID NO: 2, a substitution of G27D of SEQ ID NO: 2, a substitution of K955R of SEQ ID NO: 2, a substitution of S867R of SEQ ID NO: 2, a substitution of R693I of SEQ ID NO: 2, a substitution of F189Y of SEQ ID NO: 2, a substitution of V635M of SEQ ID NO: 2, a substitution of F399L of SEQ ID NO: 2, a substitution of E498K of SEQ ID NO: 2, a substitution of E386R of SEQ ID NO: 2, a substitution of V254G of SEQ ID NO: 2, a substitution of P793S of SEQ ID NO: 2, a substitution of K188E of SEQ ID NO: 2, a substitution of QT945KI of SEQ ID NO: 2, a substitution of T620P of SEQ ID NO: 2, a substitution of T946P of SEQ ID NO: 2, a substitution of TT949PP of SEQ ID NO: 2, a substitution of N952T of SEQ ID NO: 2, a substitution of K682E of SEQ ID NO: 2, a substitution of K975R of SEQ ID NO: 2, a substitution of L212P of SEQ ID NO: 2, a substitution of E292R of SEQ ID NO: 2, a substitution of 1303K of SEQ ID NO: 2, a substitution of C349E of SEQ ID NO: 2, a substitution of E385P of SEQ ID NO: 2, a substitution of E386N of SEQ ID NO: 2, a substitution of D387K of SEQ ID NO: 2, a substitution of L404K of SEQ ID NO: 2, a substitution of E466H of SEQ ID NO: 2, a substitution of C477Q of SEQ ID NO: 2, a substitution of C477H of SEQ ID NO: 2, a substitution of C479A of SEQ ID NO: 2, a substitution of D659H of SEQ ID NO: 2, a substitution of T806V of SEQ ID NO: 2, a substitution of K8085 of SEQ ID NO: 2, an insertion of AS at position 797 of SEQ ID NO: 2, a substitution of V959M of SEQ ID NO: 2, a substitution of K975Q of SEQ ID NO: 2, a substitution of W974G of SEQ ID NO: 2, a substitution of A708Q of SEQ ID NO: 2, a substitution of V711K of SEQ ID NO: 2, a substitution of D733T of SEQ ID NO: 2, a substitution of L742W of SEQ ID NO: 2, a substitution of V747K of SEQ ID NO: 2, a substitution of F755M of SEQ ID NO: 2, a substitution of M771A of SEQ ID NO: 2, a substitution of M771Q of SEQ ID NO: 2, a substitution of W782Q of SEQ ID NO: 2, a substitution of G791F, of SEQ ID NO: 2 a substitution of L792D of SEQ ID NO: 2, a substitution of L792K of SEQ ID NO: 2, a substitution of P793Q of SEQ ID NO: 2, a substitution of P793G of SEQ ID NO: 2, a substitution of Q804A of SEQ ID NO: 2, a substitution of Y966N of SEQ ID NO: 2, a substitution of Y723N of SEQ ID NO: 2, a substitution of Y857R of SEQ ID NO: 2, a substitution of 5890R of SEQ ID NO: 2, a substitution of S932M of SEQ ID NO: 2, a substitution of L897M of SEQ ID NO: 2, a substitution of R624G of SEQ ID NO: 2, a substitution of 5603G of SEQ ID NO: 2, a substitution of N737S of SEQ ID NO: 2, a substitution of L307K of SEQ ID NO: 2, a substitution of I658V of SEQ ID NO: 2, an insertion of PT at position 688 of SEQ ID NO: 2, an insertion of SA at position 794 of SEQ ID NO: 2, a substitution of S877R of SEQ ID NO: 2, a substitution of N580T of SEQ ID NO: 2, a substitution of V335G of SEQ ID NO: 2, a substitution of T620S of SEQ ID NO: 2, a substitution of W345G of SEQ ID NO: 2, a substitution of T280S of SEQ ID NO: 2, a substitution of L406P of SEQ ID NO: 2, a substitution of A612D of SEQ ID NO: 2, a substitution of A751S of SEQ ID NO: 2, a substitution of E386R of SEQ ID NO: 2, a substitution of V351M of SEQ ID NO: 2, a substitution of K210N of SEQ ID NO: 2, a substitution of D40A of SEQ ID NO: 2, a substitution of E773G of SEQ ID NO: 2, a substitution of H207L of SEQ ID NO: 2, a substitution of T62A SEQ ID NO: 2, a substitution of T287P of SEQ ID NO: 2, a substitution of T832A of SEQ ID NO: 2, a substitution of A893S of SEQ ID NO: 2, an insertion of V at position 14 of SEQ ID NO: 2, an insertion of AG at position 13 of SEQ ID NO: 2, a substitution of R11V of SEQ ID NO: 2, a substitution of R12N of SEQ ID NO: 2, a substitution of R13H of SEQ ID NO: 2, an insertion of Y at position 13 of SEQ ID NO: 2, a substitution of R12L of SEQ ID NO: 2, an insertion of Q at position 13 of SEQ ID NO: 2, an substitution of V155 of SEQ ID NO: 2, an insertion of D at position 17 of SEQ ID NO: 2 or a combination thereof.

[0223] In some embodiments, a CasX variant protein comprises at least two amino acid changes to a reference CasX protein amino acid sequence. The at least two amino acid changes can be substitutions, insertions, or deletions of a reference CasX protein amino acid sequence, or any combination thereof. In some embodiments, the at least two amino acid changes to the sequence of a reference CasX variant protein are selected from the group consisting of: a substitution of Y789T of SEQ ID NO: 2, a deletion of P793 of SEQ ID NO: 2, a substitution of Y789D of SEQ ID NO: 2, a substitution of T72S of SEQ ID NO: 2, a substitution of I546V of SEQ ID NO: 2, a substitution of E552A of SEQ ID NO: 2, a substitution of A636D of SEQ ID NO: 2, a substitution of F536S of SEQ ID NO:2, a substitution of A708K of SEQ ID NO: 2, a substitution of Y797L of SEQ ID NO: 2, a substitution of L792G SEQ ID NO: 2, a substitution of A739V of SEQ ID NO: 2, a substitution of G791M of SEQ ID NO: 2, an insertion of A at position 661 of SEQ ID NO: 2, a substitution of A788W of SEQ ID NO: 2, a substitution of K390R of SEQ ID NO: 2, a substitution of A751S of SEQ ID NO: 2, a substitution of E385A of SEQ ID NO: 2, an insertion of P at position 696 of SEQ ID NO: 2, an insertion of M at position 773 of SEQ ID NO: 2, a substitution of G695H of SEQ ID NO: 2, an insertion of AS at position 793 of SEQ ID NO: 2, an insertion of AS at position 795 of SEQ ID NO: 2, a substitution of C477R of SEQ ID NO: 2, a substitution of C477K of SEQ ID NO: 2, a substitution of C479A of SEQ ID NO: 2, a substitution of C479L of SEQ ID NO: 2, a substitution of I55F of SEQ ID NO: 2, a substitution of K210R of SEQ ID NO: 2, a substitution of C233S of SEQ ID NO: 2, a substitution of D231N of SEQ ID NO: 2, a substitution of Q338E of SEQ ID NO: 2, a substitution of Q338R of SEQ ID NO: 2, a substitution of L379R of SEQ ID NO: 2, a substitution of K390R of SEQ ID NO: 2, a substitution of L481Q of SEQ ID NO: 2, a substitution of F495S of SEQ ID NO:2, a substitution of D600N of SEQ ID NO: 2, a substitution of T886K of SEQ ID NO: 2, a substitution of A739V of SEQ ID NO: 2, a substitution of K460N of SEQ ID NO: 2, a substitution of I199F of SEQ ID NO: 2, a substitution of G492P of SEQ ID NO: 2, a substitution of T1531 of SEQ ID NO: 2, a substitution of R591I of SEQ ID NO: 2, an insertion of AS at position 795 of SEQ ID NO: 2, an insertion of AS at position 796 of SEQ ID NO:2, an insertion of L at position 889 of SEQ ID NO: 2, a substitution of E121D of SEQ ID NO: 2, a substitution of S270W of SEQ ID NO: 2, a substitution of E712Q of SEQ ID NO: 2, a substitution of K942Q of SEQ ID NO: 2, a substitution of E552K of SEQ ID NO:2, a substitution of K25Q of SEQ ID NO: 2, a substitution of N47D of SEQ ID NO: 2, an insertion of T at position 696 of SEQ ID NO: 2, a substitution of L685I of SEQ ID NO: 2, a substitution of N880D of SEQ ID NO: 2, a substitution of Q102R of SEQ ID NO: 2, a substitution of M734K of SEQ ID NO: 2, a substitution of A724S of SEQ ID NO: 2, a substitution of T704K of SEQ ID NO: 2, a substitution of P224K of SEQ ID NO: 2, a substitution of K25R of SEQ ID NO: 2, a substitution of M29E of SEQ ID NO: 2, a substitution of H152D of SEQ ID NO: 2, a substitution of S219R of SEQ ID NO: 2, a substitution of E475K of SEQ ID NO: 2, a substitution of G226R of SEQ ID NO: 2, a substitution of A377K of SEQ ID NO: 2, a substitution of E480K of SEQ ID NO: 2, a substitution of K416E of SEQ ID NO: 2, a substitution of H164R of SEQ ID NO: 2, a substitution of K767R of SEQ ID NO: 2, a substitution of I7F of SEQ ID NO: 2, a substitution of M29R of SEQ ID NO: 2, a substitution of H435R of SEQ ID NO: 2, a substitution of E385Q of SEQ ID NO: 2, a substitution of E385K of SEQ ID NO: 2, a substitution of I279F of SEQ ID NO: 2, a substitution of D489S of SEQ ID NO: 2, a substitution of D732N of SEQ ID NO: 2, a substitution of A739T of SEQ ID NO: 2, a substitution of W885R of SEQ ID NO: 2, a substitution of E53K of SEQ ID NO: 2, a substitution of A238T of SEQ ID NO: 2, a substitution of P283Q of SEQ ID NO: 2, a substitution of E292K of SEQ ID NO: 2, a substitution of Q628E of SEQ ID NO: 2, a substitution of R388Q of SEQ ID NO: 2, a substitution of G791M of SEQ ID NO: 2, a substitution of L792K of SEQ ID NO: 2, a substitution of L792E of SEQ ID NO: 2, a substitution of M779N of SEQ ID NO: 2, a substitution of G27D of SEQ ID NO: 2, a substitution of K955R of SEQ ID NO: 2, a substitution of S867R of SEQ ID NO: 2, a substitution of R693I of SEQ ID NO: 2, a substitution of F189Y of SEQ ID NO: 2, a substitution of V635M of SEQ ID NO: 2, a substitution of F399L of SEQ ID NO: 2, a substitution of E498K of SEQ ID NO: 2, a substitution of E386R of SEQ ID NO: 2, a substitution of V254G of SEQ ID NO: 2, a substitution of P793S of SEQ ID NO: 2, a substitution of K188E of SEQ ID NO: 2, a substitution of QT945KI of SEQ ID NO: 2, a substitution of T620P of SEQ ID NO: 2, a substitution of T946P of SEQ ID NO: 2, a substitution of TT949PP of SEQ ID NO: 2, a substitution of N952T of SEQ ID NO: 2, a substitution of K682E of SEQ ID NO: 2, a substitution of K975R of SEQ ID NO: 2, a substitution of L212P of SEQ ID NO: 2, a substitution of E292R of SEQ ID NO: 2, a substitution of 1303K of SEQ ID NO: 2, a substitution of C349E of SEQ ID NO: 2, a substitution of E385P of SEQ ID NO: 2, a substitution of E386N of SEQ ID NO: 2, a substitution of D387K of SEQ ID NO: 2, a substitution of L404K of SEQ ID NO: 2, a substitution of E466H of SEQ ID NO: 2, a substitution of C477Q of SEQ ID NO: 2, a substitution of C477H of SEQ ID NO: 2, a substitution of C479A of SEQ ID NO: 2, a substitution of D659H of SEQ ID NO: 2, a substitution of T806V of SEQ ID NO: 2, a substitution of K8085 of SEQ ID NO: 2, an insertion of AS at position 797 of SEQ ID NO: 2, a substitution of V959M of SEQ ID NO: 2, a substitution of K975Q of SEQ ID NO: 2, a substitution of W974G of SEQ ID NO: 2, a substitution of A708Q of SEQ ID NO: 2, a substitution of V711K of SEQ ID NO: 2, a substitution of D733T of SEQ ID NO: 2, a substitution of L742W of SEQ ID NO: 2, a substitution of V747K of SEQ ID NO: 2, a substitution of F755M of SEQ ID NO: 2, a substitution of M771A of SEQ ID NO: 2, a substitution of M771Q of SEQ ID NO: 2, a substitution of W782Q of SEQ ID NO: 2, a substitution of G791F, of SEQ ID NO: 2 a substitution of L792D of SEQ ID NO: 2, a substitution of L792K of SEQ ID NO: 2, a substitution of P793Q of SEQ ID NO: 2, a substitution of P793G of SEQ ID NO: 2, a substitution of Q804A of SEQ ID NO: 2, a substitution of Y966N of SEQ ID NO: 2, a substitution of Y723N of SEQ ID NO: 2, a substitution of Y857R of SEQ ID NO: 2, a substitution of 5890R of SEQ ID NO: 2, a substitution of S932M of SEQ ID NO: 2, a substitution of L897M of SEQ ID NO: 2, a substitution of R624G of SEQ ID NO: 2, a substitution of 5603G of SEQ ID NO: 2, a substitution of N737S of SEQ ID NO: 2, a substitution of L307K of SEQ ID NO: 2, a substitution of I658V of SEQ ID NO: 2, an insertion of PT at position 688 of SEQ ID NO: 2, an insertion of SA at position 794 of SEQ ID NO: 2, a substitution of S877R of SEQ ID NO: 2, a substitution of N580T of SEQ ID NO: 2, a substitution of V335G of SEQ ID NO: 2, a substitution of T620S of SEQ ID NO: 2, a substitution of W345G of SEQ ID NO: 2, a substitution of T280S of SEQ ID NO: 2, a substitution of L406P of SEQ ID NO: 2, a substitution of A612D of SEQ ID NO: 2, a substitution of A751S of SEQ ID NO: 2, a substitution of E386R of SEQ ID NO: 2, a substitution of V351M of SEQ ID NO: 2, a substitution of K210N of SEQ ID NO: 2, a substitution of D40A of SEQ ID NO: 2, a substitution of E773G of SEQ ID NO: 2, a substitution of H207L of SEQ ID NO: 2, a substitution of T62A SEQ ID NO: 2, a substitution of T287P of SEQ ID NO: 2, a substitution of T832A of SEQ ID NO: 2, a substitution of A893S of SEQ ID NO: 2, an insertion of V at position 14 of SEQ ID NO: 2, an insertion of AG at position 13 of SEQ ID NO: 2, a substitution of R11V of SEQ ID NO: 2, a substitution of R12N of SEQ ID NO: 2, a substitution of R13H of SEQ ID NO: 2, an insertion of Y at position 13 of SEQ ID NO: 2, a substitution of R12L of SEQ ID NO: 2, an insertion of Q at position 13 of SEQ ID NO: 2, an substitution of V155 of SEQ ID NO: 2 and an insertion of D at position 17 of SEQ ID NO: 2. In some embodiments, the at least two amino acid changes to a reference CasX protein are selected from the amino acid changes disclosed in the sequences of Table 3.

[0224] In some embodiments, a CasX variant protein comprises more than one substitution, insertion and/or deletion of a reference CasX protein amino acid sequence. In some embodiments, the reference CasX protein comprises or consists essentially of SEQ ID NO: 2. In some embodiments, a CasX variant protein comprises a substitution of S794R and a substitution of Y797L of SEQ ID NO: 2. In some embodiments, a CasX variant protein comprises a substitution of K416E and a substitution of A708K of SEQ ID NO: 2. In some embodiments, a CasX variant protein comprises a substitution of A708K and a deletion of P793 of SEQ ID NO: 2. In some embodiments, a CasX variant protein comprises a deletion of P793 and a substitution of P793AS SEQ ID NO: 2. In some embodiments, a CasX variant protein comprises a substitution of Q367K and a substitution of I425S of SEQ ID NO: 2. In some embodiments, a CasX variant protein comprises a substitution of A708K, a deletion of P position 793 and a substitution A793V of SEQ ID NO: 2. In some embodiments, a CasX variant protein comprises a substitution of Q338R and a substitution of A339E of SEQ ID NO: 2. In some embodiments, a CasX variant protein comprises a substitution of Q338R and a substitution of A339K of SEQ ID NO: 2. In some embodiments, a CasX variant protein comprises a substitution of 5507G and a substitution of G508R of SEQ ID NO: 2. In some embodiments, a CasX variant protein comprises a substitution of L379R, a substitution of A708K and a deletion of P at position 793 of SEQ ID NO: 2. In some embodiments, a CasX variant protein comprises a substitution of C477K, a substitution of A708K and a deletion of P at position 793 of SEQ ID NO: 2. In some embodiments, a CasX variant protein comprises a substitution of L379R, a substitution of C477K, a substitution of A708K and a deletion of P at position of 793 of SEQ ID NO: 2. In some embodiments, a CasX variant protein comprises a substitution of L379R, a substitution of A708K, a deletion of P at position 793 and a substitution A739V of SEQ ID NO: 2. In some embodiments, a CasX variant protein comprises a substitution of C477K, a substitution of A708K, a deletion of P at position 793 and a substitution of A739V of SEQ ID NO: 2. In some embodiments, a CasX variant protein comprises a substitution of L379R, a substitution of C477K, a substitution of A708K, a deletion of P at position 793 and a substitution of A739V of SEQ ID NO: 2. In some embodiments, a CasX variant protein comprises a substitution of L379R, a substitution of A708K, a deletion of P at position 793 and a substitution of M779N of SEQ ID NO: 2. In some embodiments, a CasX variant protein comprises a substitution of L379R, a substitution of A708K, a deletion of P at position 793 and a substitution of M771N of SEQ ID NO: 2. In some embodiments, a CasX variant protein comprises a substitution of L379R, a substitution of 708K, a deletion of P at position 793 and a substitution of D489S of SEQ ID NO: 2. In some embodiments, a CasX variant protein comprises a substitution of L379R, a substitution of A708K, a deletion of P at position 793 and a substitution of A739T of SEQ ID NO: 2. In some embodiments, a CasX variant protein comprises a substitution of L379R, a substitution of A708K, a deletion of P at position 793 and a substitution of D732N of SEQ ID NO: 2. In some embodiments, a CasX variant protein comprises a substitution of L379R, a substitution of A708K, a deletion of P at position 793 and a substitution of G791M of SEQ ID NO: 2. In some embodiments, a CasX variant protein comprises a substitution of L379R, a substitution of 708K, a deletion of P at position 793 and a substitution of Y797L of SEQ ID NO: 2. In some embodiments, a CasX variant protein comprises a substitution of L379R, a substitution of C477K, a substitution of A708K, a deletion of P at position 793 and a substitution of M779N of SEQ ID NO: 2. In some embodiments, a CasX variant protein comprises a substitution of L379R, a substitution of C477K, a substitution of A708K, a deletion of P at position 793 and a substitution of M771N of SEQ ID NO: 2. In some embodiments, a CasX variant protein comprises a substitution of L379R, a substitution of C477K, a substitution of A708K, a deletion of P at position 793 and a substitution of D489S of SEQ ID NO: 2. In some embodiments, a CasX variant protein comprises a substitution of L379R, a substitution of C477K, a substitution of A708K, a deletion of P at position 793 and a substitution of A739T of SEQ ID NO: 2. In some embodiments, a CasX variant protein comprises a substitution of L379R, a substitution of C477K, a substitution of A708K, a deletion of P at position 793 and a substitution of D732N of SEQ ID NO: 2. In some embodiments, a CasX variant protein comprises a substitution of L379R, a substitution of C477K, a substitution of A708K, a deletion of P at position 793 and a substitution of G791M of SEQ ID NO: 2. In some embodiments, a CasX variant protein comprises a substitution of L379R, a substitution of C477K, a substitution of A708K, a deletion of P at position 793 and a substitution of Y797L of SEQ ID NO: 2. In some embodiments, a CasX variant protein comprises a substitution of L379R, a substitution of C477K, a substitution of A708K, a deletion of P at position 793 and a substitution of T620P of SEQ ID NO: 2. In some embodiments, a CasX variant protein comprises a substitution of A708K, a deletion of P at position 793 and a substitution of E386S of SEQ ID NO: 2. In some embodiments, a CasX variant protein comprises a substitution of E386R, a substitution of F399L and a deletion of P at position 793 of SEQ ID NO: 2. In some embodiments, a CasX variant protein comprises a substitution of R581I and A739V of SEQ ID NO: 2. In some embodiments, a CasX variant comprises any combination of the foregoing embodiments of this paragraph.

[0225] In some embodiments, a CasX variant protein comprises more than one substitution, insertion and/or deletion of a reference CasX protein amino acid sequence. In some embodiments, a CasX variant protein comprises a substitution of A708K, a deletion of P at position 793 and a substitution of A739V of SEQ ID NO: 2. In some embodiments, a CasX variant protein comprises a substitution of L379R, a substitution of A708K and a deletion of P at position 793 of SEQ ID NO: 2. In some embodiments, a CasX variant protein comprises a substitution of C477K, a substitution of A708K and a deletion of P at position 793 of SEQ ID NO: 2. In some embodiments, a CasX variant protein comprises a substitution of L379R, a substitution of C477K, a substitution of A708K and a deletion of P at position 793 of SEQ ID NO: 2. In some embodiments, a CasX variant protein comprises a substitution of L379R, a substitution of A708K, a deletion of P at position 793 and a substitution of A739V of SEQ ID NO: 2. In some embodiments, a CasX variant protein comprises a substitution of C477K, a substitution of A708K, a deletion of P at position 793 and a substitution of A739 of SEQ ID NO: 2. In some embodiments, a CasX variant protein comprises a substitution of L379R, a substitution of C477K, a substitution of A708K, a deletion of P at position 793 and a substitution of A739V of SEQ ID NO: 2. In some embodiments, a CasX variant protein comprises a substitution of L379R, a substitution of C477K, a substitution of A708K, a deletion of P at position 793 and a substitution of T620P of SEQ ID NO: 2. In some embodiments, a CasX variant protein comprises a substitution of M771A of SEQ ID NO: 2. In some embodiments, a CasX variant protein comprises a substitution of L379R, a substitution of A708K, a deletion of P at position 793 and a substitution of D732N of SEQ ID NO: 2. In some embodiments, a CasX variant protein comprises a substitution of W782Q of SEQ ID NO: 2. In some embodiments, a CasX variant protein comprises a substitution of M771Q of SEQ ID NO: 2. In some embodiments, a CasX variant protein comprises a substitution of R458I and a substitution of A739V of SEQ ID NO: 2. In some embodiments, a CasX variant protein comprises a substitution of L379R, a substitution of A708K, a deletion of P at position 793 and a substitution of M771N of SEQ ID NO: 2. In some embodiments, a CasX variant protein comprises a substitution of L379R, a substitution of A708K, a deletion of P at position 793 and a substitution of A739T of SEQ ID NO: 2. In some embodiments, a CasX variant protein comprises a substitution of L379R, a substitution of C477K, a substitution of A708K, a deletion of P at position 793 and a substitution of D489S of SEQ ID NO: 2. In some embodiments, a CasX variant protein comprises a substitution of L379R, a substitution of C477K, a substitution of A708K, a deletion of P at position 793 and a substitution of D732N of SEQ ID NO: 2. In some embodiments, a CasX variant comprises any combination of the foregoing embodiments of this paragraph.

[0226] In some embodiments, a CasX variant protein comprises a substitution of V711K of SEQ ID NO: 2. In some embodiments, a CasX variant protein comprises a substitution of L379R, a substitution of C477K, a substitution of A708K, a deletion of P at position 793 and a substitution of Y797L of SEQ ID NO: 2. In some embodiments, a CasX variant protein comprises a substitution of L379R, a substitution of A708K and a deletion of P at position 793 of SEQ ID NO: 2.

[0227] In some embodiments, a CasX variant protein comprises a substitution of L379R, a substitution of C477K, a substitution of A708K, a deletion of P at position 793 and a substitution of M771N of SEQ ID NO: 2. In some embodiments, a CasX variant protein comprises a substitution of A708K, a substitution of P at position 793 and a substitution of E386S of SEQ ID NO: 2.

[0228] In some embodiments, a CasX variant protein comprises a substitution of L379R, a substitution of C477K, a substitution of A708K and a deletion of P at position 793 of SEQ ID NO: 2. In some embodiments, a CasX variant protein comprises a substitution of L792D of SEQ ID NO: 2. In some embodiments, a CasX variant protein comprises a substitution of G791F of SEQ ID NO: 2. In some embodiments, a CasX variant protein comprises a substitution of A708K, a deletion of P at position 793 and a substitution of A739V of SEQ ID NO: 2. In some embodiments, a CasX variant protein comprises a substitution of L379R, a substitution of A708K, a deletion of P at position 793 and a substitution of A739V of SEQ ID NO: 2. In some embodiments, a CasX variant protein comprises a substitution of C477K, a substitution of A708K and a substitution of P at position 793 of SEQ ID NO: 2. In some embodiments, a CasX variant protein comprises a substitution of L249I and a substitution of M771N of SEQ ID NO: 2. In some embodiments, a CasX variant protein comprises a substitution of V747K of SEQ ID NO: 2. In some embodiments, a CasX variant protein comprises a substitution of L379R, a substitution of C477, a substitution of A708K, a deletion of P at position 793 and a substitution of M779N of SEQ ID NO: 2. In some embodiments, a CasX variant protein comprises a substitution of F755M.

[0229] In some embodiments, the CasX variant protein comprises between 400 and 2000 amino acids, between 500 and 1500 amino acids, between 700 and 1200 amino acids, between 800 and 1100 amino acids or between 900 and 1000 amino acids.

[0230] In some embodiments, the CasX variant protein comprises one or more modifications comprising a region of non-contiguous residues that form a channel in which gNA:target DNA complexing occurs. In some embodiments, the CasX variant protein comprises one or more modifications comprising a region of non-contiguous residues that form an interface which binds with the gNA. For example, in some embodiments of a reference CasX protein, the Helical I, Helical II and OBD domains all contact or are in proximity to the gNA:target DNA complex, and one or more modifications to non-contiguous residues within any of these domains may improve function of the CasX variant protein.

[0231] In some embodiments, the CasX variant protein comprises one or more modifications comprising a region of non-contiguous residues that form a channel which binds with the non-target strand DNA. For example, a CasX variant protein can comprise one or more modifications to non-contiguous residues of the NTSBD. In some embodiments, the CasX variant protein comprises one or more modifications comprising a region of non-contiguous residues that form an interface which binds with the PAM. For example, a CasX variant protein can comprise one or more modifications to non-contiguous residues of the Helical I domain or OBD. In some embodiments, the CasX variant protein comprises one or more modifications comprising a region of non-contiguous surface-exposed residues. As used herein, “surface-exposed residues” refers to amino acids on the surface of the CasX protein, or amino acids in which at least a portion of the amino acid, such as the backbone or a part of the side chain is on the surface of the protein. Surface exposed residues of cellular proteins such as CasX, which are exposed to an aqueous intracellular environment, are frequently selected from positively charged hydrophilic amino acids, for example arginine, asparagine, aspartate, glutamine, glutamate, histidine, lysine, serine, and threonine. Thus, for example, in some embodiments of the variants provided herein, a region of surface exposed residues comprises one or more insertions, deletions, or substitutions compared to a reference CasX protein. In some embodiments, one or more positively charged residues are substituted for one or more other positively charged residues, or negatively charged residues, or uncharged residues, or any combinations thereof. In some embodiments, one or more amino acids residues for substitution are near bound nucleic acid, for example residues in the RuvC domain or Helical I domain that contact target DNA, or residues in the OBD or Helical II domain that bind the gRNA, can be substituted for one or more positively charged or polar amino acids.

[0232] In some embodiments, the CasX variant protein comprises one or more modifications comprising a region of non-contiguous residues that form a core through hydrophobic packing in a domain of the reference CasX protein. Without wishing to be bound by any theory, regions that form cores through hydrophobic packing are rich in hydrophobic amino acids such as valine, isoleucine, leucine, methionine, phenylalanine, tryptophan, and cysteine. For example, in some reference CasX proteins, RuvC domains comprise a hydrophobic pocket adjacent to the active site. In some embodiments, between 2 to 15 residues of the region are charged, polar, or base-stacking. Charged amino acids (interchangeably referred to herein as residues) may include, for example, arginine, lysine, aspartic acid, and glutamic acid, and the side chains of these amino acids may form salt bridges provided a bridge partner is also present. Polar amino acids may include, for example, glutamine, asparagine, histidine, serine, threonine, tyrosine, and cysteine. Polar amino acids can, in some embodiments, form hydrogen bonds as proton donors or acceptors, depending on the identity of their side chains. As used herein, “base-stacking” includes the interaction of aromatic side chains of an amino acid residue (such as tryptophan, tyrosine, phenylalanine, or histidine) with stacked nucleotide bases in a nucleic acid. Any modification to a region of non-contiguous amino acids that are in close spatial proximity to form a functional part of the CasX variant protein is envisaged as within the scope of the disclosure.

[0233] i. CasX Variant Proteins with Domains from Multiple Source Proteins

[0234] In certain embodiments, the disclosure provides a chimeric CasX protein comprising protein domains from two or more different CasX proteins, such as two or more reference CasX proteins, or two or more CasX variant protein sequences as described herein. As used herein, a “chimeric CasX protein” refers to a CasX containing at least two domains isolated or derived from different sources, such as two naturally occurring proteins, which may, in some embodiments, be isolated from different species. For example, in some embodiments, a chimeric CasX protein comprises a first domain from a first CasX protein and a second domain from a second, different CasX protein. In some embodiments, the first domain can be selected from the group consisting of the NTSB, TSL, Helical I, Helical II, OBD and RuvC domains. In some embodiments, the second domain is selected from the group consisting of the NTSB, TSL, Helical I, Helical II, OBD and RuvC domains with the second domain being different from the foregoing first domain. For example, a chimeric CasX protein may comprise an NTSB, TSL, Helical I, Helical II, OBD domains from a CasX protein of SEQ ID NO: 2, and a RuvC domain from a CasX protein of SEQ ID NO: 1, or vice versa. As a further example, a chimeric CasX protein may comprise an NTSB, TSL, Helical II, OBD and RuvC domain from CasX protein of SEQ ID NO: 2, and a Helical I domain from a CasX protein of SEQ ID NO: 1, or vice versa. Thus, in certain embodiments, a chimeric CasX protein may comprise an NTSB, TSL, Helical II, OBD and RuvC domain from a first CasX protein, and a Helical I domain from a second CasX protein. In some embodiments of the chimeric CasX proteins, the domains of the first CasX protein are derived from the sequences of SEQ ID NO: 1, SEQ ID NO: 2 or SEQ ID NO: 3, and the domains of the second CasX protein are derived from the sequences of SEQ ID NO: 1, SEQ ID NO: 2 or SEQ ID NO: 3, and the first and second CasX proteins are not the same. In some embodiments, domains of the first CasX protein comprise sequences derived from SEQ ID NO: 1 and domains of the second CasX protein comprise sequences derived from SEQ ID NO: 2. In some embodiments, domains of the first CasX protein comprise sequences derived from SEQ ID NO: 1 and domains of the second CasX protein comprise sequences derived from SEQ ID NO: 3. In some embodiments, domains of the first CasX protein comprise sequences derived from SEQ ID NO: 2 and domains of the second CasX protein comprise sequences derived from SEQ ID NO: 3.

[0235] In some embodiments, a CasX variant protein comprises at least one chimeric domain comprising a first part from a first CasX protein and a second part from a second, different CasX protein. As used herein, a “chimeric domain” refers to a single domain containing at least two parts isolated or derived from different sources, such as two naturally occurring proteins or portions of domains from two reference CasX proteins. The at least one chimeric domain can be any of the NTSB, TSL, Helical I, Helical II, OBD or RuvC domains as described herein. In some embodiments, the first portion of a CasX domain comprises a sequence of SEQ ID NO: 1 and the second portion of a CasX domain comprises a sequence of SEQ ID NO: 2. In some embodiments, the first portion of the CasX domain comprises a sequence of SEQ ID NO: 1 and the second portion of the CasX domain comprises a sequence of SEQ ID NO: 3. In some embodiments, the first portion of the CasX domain comprises a sequence of SEQ ID NO: 2 and the second portion of the CasX domain comprises a sequence of SEQ ID NO: 3. In some embodiments, the at least one chimeric domain comprises a chimeric RuvC domain. As an example of the foregoing, the chimeric RuvC domain comprises amino acids 661 to 824 of SEQ ID NO: 1 and amino acids 922 to 978 of SEQ ID NO: 2. As an alternative example of the foregoing, a chimeric RuvC domain comprises amino acids 648 to 812 of SEQ ID NO: 2 and amino acids 935 to 986 of SEQ ID NO: 1. In some embodiments, a CasX protein comprises a first domain from a first CasX protein and a second domain from a second CasX protein, and at least one chimeric domain comprising at least two parts isolated from different CasX proteins using the approach of the embodiments described in this paragraph.

[0236] In some embodiments, a CasX variant protein comprises a sequence of SEQ ID NOS: 49-160 as set forth in Table 3. In some embodiments, a CasX variant protein consists of a sequence of SEQ ID NOS: 49-160 as set forth in Table 3. In other embodiments, a CasX variant protein comprises a sequence at least 60% identical, at least 65% identical, at least 70% identical, at least 75% identical, at least 80% identical, at least 81% identical, at least 82% identical, at least 83% identical, at least 84% identical, at least 85% identical, at least 86% identical, at least 86% identical, at least 87% identical, at least 88% identical, at least 89% identical, at least 89% identical, at least 90% identical, at least 91% identical, at least 92% identical, at least 93% identical, at least 94% identical, at least 95% identical, at least 96% identical, at least 97% identical, at least 98% identical, at least 99% identical, at least 99.5% identical to a sequence set forth in Table 3.

TABLE 3
CasX Variant Sequences
(*Where a number is indicated in the left column, itdesignates a CasX variant
identification number different than the SEQ ID NO assigned to it;
where indicated, are relative to SEQ ID NO: 2)

| Description* | Amino Acid Sequence |
|---|---|
| TSL, Helical | MQEIKRINKIRRRLVKDSNTKKAGKTGPMKTLLVRVMTPDLRERLENLRKKP |
| I, Helical II, | ENIPQPISNTSRANLNKLLTDYTEMKKAILHVYWEEFQKDPVGLMSRVAQPA |
| OBD and | SKKIDQNKLKPEMDEKGNLTTAGFACSQCGQPLFVYKLEQVSEKGKAYTNYF |
| RuvC | GRCNVAEHEKLILLAQLKPEKDSDEAVTYSLGKFGQRALDFYSIHVTRESNH |
| domains | PVKPLEQIGGNSCASGPVGKALSDACMGAVASFLTKYQDIIIEHQKVIKKNE |
| from SEQ ID | KRLANLKDIASANGLAFPKITLPPQPHTKEGIEAYNNVVAQIVIWVNLNLWQ |
| NO: 2 and an | KLKIGRDEAKPLQRLKGFPSFPLVERQANEVDWWDMVCNVKKLINEKKEDGK |
| NTSB | VFWQNLAGYKRQEALRPYLSSEEDRKKGKKFARYQFGDLLLHLEKKHGEDWG |
| domain from | KVYDEAWERIDKKVEGLSKHIKLEEERRSEDAQSKAALTDWLRAKASFVIEG |
| SEQ ID | LKEADKDEFCRCELKLQKWYGDLRGKPFAIEAENSILDISGFSKQYNCAFIW |
| NO: 1 | QKDGVKKLNLYLIINYFKGGKLRFKKIKPEAFEANRFYTVINKKSGEIVPME |
| | VNFNFDDPNLIILPLAFGKRQGREFIWNDLLSLETGSLKLANGRVIEKTLYN |
| | RRTRQDEPALFVALTFERREVLDSSNIKPMNLIGIDRGENIPAVIALTDPEG |
| | CPLSRFKDSLGNPTHILRIGESYKEKQRTIQAKKEVEQRRAGGYSRKYASKA |
| | KNLADDMVRNTARDLLYYAVTQDAMLIFENLSRGFGRQGKRTFMAERQYTRM |
| | EDWLTAKLAYEGLSKTYLSKTLAQYTSKTCSNCGFTITSADYDRVLEKLKKT |
| | ATGWMTTINGKELKVEGQITYYNRYKRQNVVKDLSVELDRLSEESVNNDISS |
| | WTKGRSGEALSLLKKRFSHRPVQEKFVCLNCGFETHADEQAALNIARSWLFL |
| | RSQEYKKYQTNKTTGNTDKRAFVETWQSFYRKKLKEVWKPAV (SEQ ID |
| | NO: 49) |
| NTSB, | MQEIKRINKIRRRLVKDSNTKKAGKTGPMKTLLVRVMTPDLRERLENLRKKP |
| Helical I, | ENIPQPISNTSRANLNKLLTDYTEMKKAILHVYWEEFQKDPVGLMSRVAQPA |
| Helical II, | PKNIDQRKLIPVKDGNERLTSSGFACSQCCQPLYVYKLEQVNDKGKPHTNYF |
| OBD and | GRCNVSEHERLILLSPHKPEANDELVTYSLGKFGQRALDFYSIHVTRESNHP |
| RuvC | VKPLEQIGGNSCASGPVGKALSDACMGAVASFLTKYQDIIIEHQKVIKKNEK |
| domains | RLANLKDIASANGLAFPKITLPPQPHTKEGIEAYNNVVAQIVIWVNLNLWQK |
| from SEQ ID | LKIGRDEAKPLQRLKGFPSFPLVERQANEVDWWDMVCNVKKLINEKKEDGKV |
| NO: 2 and a | FWQNLAGYKRQEALRPYLSSEEDRKKGKKFARYQFGDLLLHLEKKHGEDWGK |
| TSL domain | VYDEAWERIDKKVEGLSKHIKLEEERRSEDAQSKAALTDWLRAKASFVIEGL |
| from SEQ ID | KEADKDEFCRCELKLQKWYGDLRGKPFAIEAENSILDISGFSKQYNCAFIWQ |
| NO: 1. | KDGVKKLNLYLIINYFKGGKLRFKKIKPEAFEANRFYTVINKKSGEIVPMEV |
| | NFNFDDPNLIILPLAFGKRQGREFIWNDLLSLETGSLKLANGRVIEKTLYNR |
| | RTRQDEPALFVALTFERREVLDSSNIKPMNLIGIDRGENIPAVIALTDPEGC |
| | PLSRFKDSLGNPTHILRIGESYKEKQRTIQAKKEVEQRRAGGYSRKYASKAK |
| | NLADDMVRNTARDLLYYAVTQDAMLIFENLSRGFGRQGKRTFMAERQYTRME |
| | DWLTAKLAYEGLSKTYLSKTLAQYTSKTCSNCGFTITTADYDGMLVRLKKTS |
| | DGWATTLNNKELKAEGQITYYNRYKRQTVEKELSAELDRLSEESGNNDISKW |
| | TKGRRDEALFLLKKRFSHRPVQEQFVCLDCGHEVHADEQAALNIARSWLFLR |
| | SQEYKKYQTNKTTGNTDKRAFVETWQSFYRKKLKEVWKPAV (SEQ ID |
| | NO: 50) |
| TSL, Helical | MEKRINKIRKKLSADNATKPVSRSGPMKTLLVRVMTDDLKKRLEKRRKKPEV |
| I, Helical II, | MPQVISNNAANNLRMLLDDYTKMKEAILQVYWQEFKDDHVGLMCKFAQPAPK |
| OBD and | NIDQRKLIPVKDGNERLTSSGFACSQCCQPLYVYKLEQVNDKGKPHTNYFGR |
| RuvC | CNVSEHERLILLSPHKPEANDELVTYSLGKFGQRALDFYSIHVTKESTHPVK |
| domains | PLAQIAGNRYASGPVGKALSDACMGTIASFLSKYQDIIIEHQKVVKGNQKRL |
| from SEQ ID | ESLRELAGKENLEYPSVTLPPQPHTKEGVDAYNEVIARVRMWVNLNLWQKLK |
| NO: 1 and an | LSRDDAKPLLRLKGFPSFPVVERRENEVDWWNTINEVKKLIDAKRDMGRVFW |
| NTSB | SGVTAEKRNTILEGYNYLPNENDHKKREGSLENPKKPAKRQFGDLLLYLEKK |
| domain from | YAGDWGKVFDEAWERIDKKIAGLTSHIEREEARNAEDAQSKAVLTDWLRAKA |
| SEQ ID | SFVLERLKEMDEKEFYACEIQLQKWYGDLRGNPFAVEAENRVVDISGESIGS |
| NO: 2 | DGHSIQYRNLLAWKYLENGKREFYLLMNYGKKGRIRFTDGTDIKKSGKWQGL |
| | LYGGGKAKVIDLTFDPDDEQLIILPLAFGTRQGREFIWNDLLSLETGLIKLA |
| | NGRVIEKTIYNKKIGRDEPALFVALTFERREVVDPSNIKPVNLIGVDRGENI |
| | PAVIALTDPEGCPLPEFKDSSGGPTDILRIGEGYKEKQRAIQAAKEVEQRRA |
| | GGYSRKFASKSRNLADDMVRNSARDLFYHAVTHDAVLVFENLSRGFGRQGKR |
| | TFMTERQYTKMEDWLTAKLAYEGLTSKTYLSKTLAQYTSKTCSNCGFTITTA |
| | DYDGMLVRLKKTSDGWATTLNNKELKAEGQITYYNRYKRQTVEKELSAELDR |
| | LSEESGNNDISKWTKGRRDEALFLLKKRFSHRPVQEQFVCLDCGHEVHADEQ |
| | AALNIARSWLFLNSNSTEFKSYKSGKQPFVGAWQAFYKRRLKEVWKPNA |
| | (SEQ ID NO: 51) |
| NTSB, | MEKRINKIRKKLSADNATKPVSRSGPMKTLLVRVMTDDLKKRLEKRRKKPEV |
| Helical I, | MPQVISNNAANNLRMLLDDYTKMKEAILQVYWQEFKDDHVGLMCKFAQPASK |
| Helical II, | KIDQNKLKPEMDEKGNLTTAGFACSQCGQPLFVYKLEQVSEKGKAYTNYFGR |
| OBD and | CNVAEHEKLILLAQLKPEKDSDEAVTYSLGKFGQRALDFYSIHVTKESTHPV |
| RuvC | KPLAQIAGNRYASGPVGKALSDACMGTIASFLSKYQDIIIEHQKVVKGNQKR |
| domains | LESLRELAGKENLEYPSVTLPPQPHTKEGVDAYNEVIARVRMWVNLNLWQKL |
| from SEQ ID | KLSRDDAKPLLRLKGFPSFPVVERRENEVDWWNTINEVKKLIDAKRDMGRVF |
| NO: 1 and an | WSGVTAEKRNTILEGYNYLPNENDHKKREGSLENPKKPAKRQFGDLLLYLEK |
| TSL domain | KYAGDWGKVFDEAWERIDKKIAGLTSHIEREEARNAEDAQSKAVLTDWLRAK |
| from SEQ ID | ASFVLERLKEMDEKEFYACEIQLQKWYGDLRGNPFAVEAENRVVDISGESIG |
| NO: 2. | SDGHSIQYRNLLAWKYLENGKREFYLLMNYGKKGRIRFTDGTDIKKSGKWQG |
| | LLYGGGKAKVIDLTFDPDDEQLIILPLAFGTRQGREFIWNDLLSLETGLIKL |
| | ANGRVIEKTIYNKKIGRDEPALFVALTFERREVVDPSNIKPVNLIGVDRGEN |
| | IPAVIALTDPEGCPLPEFKDSSGGPTDILRIGEGYKEKQRAIQAAKEVEQRR |
| | AGGYSRKFASKSRNLADDMVRNSARDLFYHAVTHDAVLVFENLSRGFGRQGK |
| | RTFMTERQYTKMEDWLTAKLAYEGLTSKTYLSKTLAQYTSKTCSNCGFTITS |
| | ADYDRVLEKLKKTATGWMTTINGKELKVEGQITYYNRYKRQNVVKDLSVELD |
| | RLSEESVNNDISSWTKGRSGEALSLLKKRFSHRPVQEKFVCLNCGFETHADE |
| | QAALNIARSWLFLNSNSTEFKSYKSGKQPFVGAWQAFYKRRLKEVWKPNA |
| | (SEQ ID NO: 52) |
| NTSB, TSL, | MQEIKRINKIRRRLVKDSNTKKAGKTGPMKTLLVRVMTPDLRERLENLRKKP |
| Helical I, | ENIPQPISNTSRANLNKLLTDYTEMKKAILHVYWEEFQKDPVGLMSRVAQPA |
| Helical II and | PKNIDQRKLIPVKDGNERLTSSGFACSQCCQPLYVYKLEQVNDKGKPHTNYF |
| OBD | GRCNVSEHERLILLSPHKPEANDELVTYSLGKFGQRALDFYSIHVTRESNHP |
| domains SEQ | VKPLEQIGGNSCASGPVGKALSDACMGAVASFLTKYQDIIIEHQKVIKKNEK |
| IDNO: 2and | RLANLKDIASANGLAFPKITLPPQPHTKEGIEAYNNVVAQIVIWVNLNLWQK |
| an exogenous | LKIGRDEAKPLQRLKGFPSFPLVERQANEVDWWDMVCNVKKLINEKKEDGKV |
| RuvC | FWQNLAGYKRQEALRPYLSSEEDRKKGKKFARYQFGDLLLHLEKKHGEDWGK |
| domain or a | VYDEAWERIDKKVEGLSKHIKLEEERRSEDAQSKAALTDWLRAKASFVIEGL |
| portion | KEADKDEFCRCELKLQKWYGDLRGKPFAIEAENSILDISGFSKQYNCAFIWQ |
| thereof from | KDGVKKLNLYLIINYFKGGKLRFKKIKPEAFEANRFYTVINKKSGEIVPMEV |
| a second | NFNFDDPNLIILPLAFGKRQGREFIWNDLLSLETGSLKLANGRVIEKTLYNR |
| CasX | RTRQDEPALFVALTFERREVLDSSNIKPVNLIGVDRGENIPAVIALTDPEGC |
| protein. | PLPEFKDSSGGPTDILRIGEGYKEKQRAIQAAKEVEQRRAGGYSRKFASKSR |
| | NLADDMVRNSARDLFYHAVTHDAVLVFENLSRGFGRQGKRTFMTERQYTKME |
| | DWLTAKLAYEGLTSKTYLSKTLAQYTSKTCSNCGFTITSADYDRVLEKLKKT |
| | ATGWMTTINGKELKVEGQITYYNRYKRQNVVKDLSVELDRLSEESVNNDISS |
| | WTKGRSGEALSLLKKRFSHRPVQEKFVCLNCGFETHA (SEQ ID NO: |
| | 53) |
| | MQEIKRINKIRRRLVKDSNTKKAGKTGPMKTLLVRVMTPDLRERLENLRKKP |
| | ENIPQPISNTSRANLNKLLTDYTEMKKAILHVYWEEFQKDPVGLMSRVAQPA |
| | PKNIDQRKLIPVKDGNERLTSSGFACSQCCQPLYVYKLEQVNDKGKPHTNYF |
| | GRCNVSEHERLILLSPHKPEANDELVTYSLGKFGQRALDFYSIHVTRESNHP |
| | VKPLEQIGGNSCASGPVGKALSDACMGAVASFLTKYQDIIIEHQKVIKKNEK |
| | RLANLKDIASANGLAFPKITLPPQPHTKEGIEAYNNVVAQIVIWVNLNLWQK |
| | LKIGRDEAKPLQRLKGFPSFPLVERQANEVDWWDMVCNVKKLINEKKEDGKV |
| | FWQNLAGYKRQEALRPYLSSEEDRKKGKKFARYQFGDLLLHLEKKHGEDWGK |
| | VYDEAWERIDKKVEGLSKHIKLEEERRSEDAQSKAALTDWLRAKASFVIEGL |
| | KEADKDEFCRCELKLQKWYGDLRGKPFAIEAENSILDISGFSKQYNCAFIWQ |
| | KDGVKKLNLYLIINYFKGGKLRFKKIKPEAFEANRFYTVINKKSGEIVPMEV |
| | NFNFDDPNLIILPLAFGKRQGREFIWNDLLSLETGSLKLANGRVIEKTLYNR |
| | RTRQDEPALFVALTFERREVLDSSNIKPMNLIGIDRGENIPAVIALTDPEGC |
| | PLSRFKDSLGNPTHILRIGESYKEKQRTIQAKKEVEQRRAGGYSRKYASKAK |
| | NLADDMVRNTARDLLYYAVTQDAMLIFENLSRGFGRQGKRTFMAERQYTRME |
| | DWLTAKLAYEGLSKTYLSKTLAQYTSKTCSNCGFTITSADYDRVLEKLKKTA |
| | TGWMTTINGKELKVEGQITYYNRYKRQNVVKDLSVELDRLSEESVNNDISSW |
| | TKGRSGEALSLLKKRFSHRPVQEKFVCLNCGFETHA (SEQ ID NO: 54) |
| NTSB, TSL, | MQEIKRINKIRRRLVKDSNTKKAGKTGPMKTLLVRVMTPDLRERLENLRKKP |
| Helical II, | ENIPQP1SNNAANNLRMLLDDYTKMKEAILQVYWQEFKDDHVGLMCKFAQPA |
| OBD and | PKNIDQRKLIPVKDGNERLTSSGFACSQCCQPLYVYKLEQVNDKGKPHTNYF |
| RuvC | GRCNVSEHERLILLSPHKPEANDELVTYSLGKFGQRALDFYSIHVTKESTHP |
| domains | VKPLAQIAGNRYASGPVGKALSDACMGTIASFLSKYQDIIIEHQKVVKGNQK |
| from SEQ ID | RLESLRELAGKENLEYPSVTLPPQPHTKEGVDAYNEVIARVRMWVNLNLWQK |
| NO: 2 and a | LKLSRDDAKPLLRLKGFPSFPLVERQANEVDWWDMVCNVKKLINEKKEDGKV |
| Helical I | FWQNLAGYKRQEALRPYLSSEEDRKKGKKFARYQFGDLLLHLEKKHGEDWGK |
| domain from | VYDEAWERIDKKVEGLSKHIKLEEERRSEDAQSKAALTDWLRAKASFVIEGL |
| SEQ ID | KEADKDEFCRCELKLQKWYGDLRGKPFAIEAENSILDISGFSKQYNCAFIWQ |
| NO: 1 | KDGVKKLNLYLIINYFKGGKLRFKKIKPEAFEANRFYTVINKKSGEIVPMEV |
| | NFNFDDPNLIILPLAFGKRQGREFIWNDLLSLETGSLKLANGRVIEKTLYNR |
| | RTRQDEPALFVALTFERREVLDSSNIKPMNLIGIDRGENIPAVIALTDPEGC |
| | PLSRFKDSLGNPTHILRIGESYKEKQRTIQAKKEVEQRRAGGYSRKYASKAK |
| | NLADDMVRNTARDLLYYAVTQDAMLIFENLSRGFGRQGKRTFMAERQYTRME |
| | DWLTAKLAYEGLSKTYLSKTLAQYTSKTCSNCGFTITSADYDRVLEKLKKTA |
| | TGWMTTINGKELKVEGQITYYNRYKRQNVVKDLSVELDRLSEESVNNDISSW |
| | TKGRSGEALSLLKKRFSHRPVQEKFVCLNCGFETHADEQAALNIARSWLFLR |
| | SQEYKKYQTNKTTGNTDKRAFVETWQSFYRKKLKEVWKPAV (SEQ ID |
| | NO: 55) |
| NTSB, TSL, | MQEIKRINKIRRRLVKDSNTKKAGKTGPMKTLLVRVMTPDLRERLENLRKKP |
| Helical I, | ENIPQPISNTSRANLNKLLTDYTEMKKAILHVYWEEFQKDPVGLMSRVAQPA |
| OBD and | PKNIDQRKLIPVKDGNERLTSSGFACSQCCQPLYVYKLEQVNDKGKPHTNYF |
| RuvC | GRCNVSEHERLILLSPHKPEANDELVTYSLGKFGQRALDFYSIHVTRESNHP |
| domains | VKPLEQIGGNSCASGPVGKALSDACMGAVASFLTKYQDIIIEHQKVIKKNEK |
| from SEQ ID | RLANLKDIASANGLAFPKITLPPQPHTKEGIEAYNNVVAQIVIWVNLNLWQK |
| NO: 2 and a | LKIGRDEAKPLQRLKGFPSFPVVERRENEVDWWNTINEVKKLIDAKRDMGRV |
| Helical II | FWSGVTAEKRNTILEGYNYLPNENDHKKREGSLENPKKPAKRQFGDLLLYLE |
| domain from | KKYAGDWGKVFDEAWERIDKKIAGLTSHIEREEARNAEDAQSKAVLTDWLRA |
| SEQ ID | KASFVLERLKEMDEKEFYACEIQLQKWYGDLRGNPFAVEAENSILDISGFSK |
| NO: 1 | QYNCAFIWQKDGVKKLNLYLIINYFKGGKLRFKKIKPEAFEANRFYTVINKK |
| | SGEIVPMEVNFNFDDPNLIILPLAFGKRQGREFIWNDLLSLETGSLKLANGR |
| | VIEKTLYNRRTRQDEPALFVALTFERREVLDSSNIKPMNLIGIDRGENIPAV |
| | IALTDPEGCPLSRFKDSLGNPTHILRIGESYKEKQRTIQAKKEVEQRRAGGY |
| | SRKYASKAKNLADDMVRNTARDLLYYAVTQDAMLIFENLSRGFGRQGKRTFM |
| | AERQYTRMEDWLTAKLAYEGLSKTYLSKTLAQYTSKTCSNCGFTITSADYDR |
| | VLEKLKKTATGWMTTINGKELKVEGQITYYNRYKRQNVVKDLSVELDRLSEE |
| | SVNNDISSWTKGRSGEALSLLKKRFSHRPVQEKFVCLNCGFETHADEQAALN |
| | IARSWLFLRSQEYKKYQTNKTTGNTDKRAFVETWQSFYRKKLKEVWKPAV |
| | (SEQ ID NO: 56) |
| NTSB, TSL, | MISNTSRANLNKLLTDYTEMKKAILHVYWEEFQKDPVGLMSRVAQPAPKNID |
| Helical I, | QRKLIPVKDGNERLTSSGFACSQCCQPLYVYKLEQVNDKGKPHTNYFGRCNV |
| Helical II and | SEHERLILLSPHKPEANDELVTYSLGKFGQRALDFYSIHVTRESNHPVKPLE |
| RuvC | QIGGNSCASGPVGKALSDACMGAVASFLTKYQDIIIEHQKVIKKNEKRLANL |
| domains | KDIASANGLAFPKITLPPQPHTKEGIEAYNNVVAQIVIWVNLNLWQKLKIGR |
| from a first | DEAKPLQRLKGFPSFPLVERQANEVDWWDMVCNVKKLINEKKEDGKVFWQNL |
| CasX protein | AGYKRQEALRPYLSSEEDRKKGKKFARYQFGDLLLHLEKKHGEDWGKVYDEA |
| and an | WERIDKKVEGLSKHIKLEEERRSEDAQSKAALTDWLRAKASFVIEGLKEADK |
| exogenous | DEFCRCELKLQKWYGDLRGKPFAIEAENRVVDISGFSIGSDGHSIQYRNLLA |
| OBD or a | WKYLENGKREFYLLMNYGKKGRIRFTDGTDIKKSGKWQGLLYGGGKAKVIDL |
| part thereof | TFDPDDEQLIILPLAFGTRQGREFIWNDLLSLETGLIKLANGRVIEKTIYNK |
| from a | KIGRDEPALFVALTFERREVVDPSNIKPMNLIGIDRGENIPAVIALTDPEGC |
| second CasX | PLSRFKDSLGNPTHILRIGESYKEKQRTIQAKKEVEQRRAGGYSRKYASKAK |
| protein | NLADDMVRNTARDLLYYAVTQDAMLIFENLSRGFGRQGKRTFMAERQYTRME |
| | DWLTAKLAYEGLSKTYLSKTLAQYTSKTCSNCGFTITSADYDRVLEKLKKTA |
| | TGWMTTINGKELKVEGQITYYNRYKRQNVVKDLSVELDRLSEESVNNDISSW |
| | TKGRSGEALSLLKKRFSHRPVQEKFVCLNCGFETHADEQAALNIARSWLFLR |
| | SQEYKKYQTNKTTGNTDKRAFVETWQSFYRKKLKEVWKPAV (SEQ ID |
| | NO: 57) |
| | MEKRINKIRKKLSADNATKPVSRSGPMKTLLVRVMTDDLKKRLEKRRKKPEV |
| | MPQVISNTSRANLNKLLTDYTEMKKAILHVYWEEFQKDPVGLMSRVAQPAPK |
| | NIDQRKLIPVKDGNERLTSSGFACSQCCQPLYVYKLEQVNDKGKPHTNYFGR |
| | CNVSEHERLILLSPHKPEANDELVTYSLGKFGQRALDFYSIHVTRESNHPVK |
| | PLEQIGGNSCASGPVGKALSDACMGAVASFLTKYQDIIIEHQKVIKKNEKRL |
| | ANLKDIASANGLAFPKITLPPQPHTKEGIEAYNNVVAQIVIWVNLNLWQKLK |
| | IGRDEAKPLQRLKGFPSFPLVERQANEVDWWDMVCNVKKLINEKKEDGKVFW |
| | QNLAGYKRQEALRPYLSSEEDRKKGKKFARYQFGDLLLHLEKKHGEDWGKVY |
| | DEAWERIDKKVEGLSKHIKLEEERRSEDAQSKAALTDWLRAKASFVIEGLKE |
| | ADKDEFCRCELKLQKWYGDLRGKPFAIEAENSILDISGFSKQYNCAFIWQKD |
| | GVKKLNLYLIINYFKGGKLRFKKIKPEAFEANRFYTVINKKSGEIVPMEVNF |
| | NFDDPNLIILPLAFGKRQGREFIWNDLLSLETGSLKLANGRVIEKTLYNRRT |
| | RQDEPALFVALTFERREVLDSSNIKPMNLIGIDRGENIPAVIALTDPEGCPL |
| | SRFKDSLGNPTHILRIGESYKEKQRTIQAKKEVEQRRAGGYSRKYASKAKNL |
| | ADDMVRNTARDLLYYAVTQDAMLIFENLSRGFGRQGKRTFMAERQYTRMEDW |
| | LTAKLAYEGLSKTYLSKTLAQYTSKTCSNCGFTITSADYDRVLEKLKKTATG |
| | WMTTINGKELKVEGQITYYNRYKRQNVVKDLSVELDRLSEESVNNDISSWTK |
| | GRSGEALSLLKKRFSHRPVQEKFVCLNCGFETHADEQAALNIARSWLFLRSQ |
| | EYKKYQTNKTTGNTDKRAFVETWQSFYRKKLKEVWKPAV (SEQ ID NO: |
| | 58) |
| | MQEIKRINKIRRRLVKDSNTKKAGKTGPMKTLLVRVMTPDLRERLENLRKKP |
| | ENIPQPISNTSRANLNKLLTDYTEMKKAILHVYWEEFQKDPVGLMSRVAQPA |
| | PKNIDQRKLIPVKDGNERLTSSGFACSQCCQPLYVYKLEQVNDKGKPHTNYF |
| | GRCNVSEHERLILLSPHKPEANDELVTYSLGKFGQRALDFYSIHVTRESNHP |
| | VKPLEQIGGNSCASGPVGKALSDACMGAVASFLTKYQDIIIEHQKVIKKNEK |
| | RLANLKDIASANGLAFPKITLPPQPHTKEGIEAYNNVVAQIVIWVNLNLWQK |
| | LKIGRDEAKPLQRLKGFPSFPLVERQANEVDWWDMVCNVKKLINEKKEDGKV |
| | FWQNLAGYKRQEALRPYLSSEEDRKKGKKFARYQFGDLLLHLEKKHGEDWGK |
| | VYDEAWERIDKKVEGLSKHIKLEEERRSEDAQSKAALTDWLRAKASFVIEGL |
| | KEADKDEFCRCELKLQKWYGDLRGKPFAIEAENRVVDISGFSIGSDGHSIQY |
| | RNLLAWKYLENGKREFYLLMNYGKKGRIRFTDGTDIKKSGKWQGLLYGGGKA |
| | KVIDLTFDPDDEQLIILPLAFGTRQGREFIWNDLLSLETGLIKLANGRVIEK |
| | TIYNKKIGRDEPALEVALTFERREVVDPSNIKPMNLIGIDRGENIPAVIALT |
| | DPEGCPLSRFKDSLGNPTHILRIGESYKEKQRTIQAKKEVEQRRAGGYSRKY |
| | ASKAKNLADDMVRNTARDLLYYAVTQDAMLIFENLSRGFGRQGKRTFMAERQ |
| | YTRMEDWLTAKLAYEGLSKTYLSKTLAQYTSKTCSNCGFTITSADYDRVLEK |
| | LKKTATGWMTTINGKELKVEGQITYYNRYKRQNVVKDLSVELDRLSEESVNN |
| | DISSWTKGRSGEALSLLKKRFSHRPVQEKFVCLNCGFETHADEQAALNIARS |
| | WLFLRSQEYKKYQTNKTTGNTDKRAFVETWQSFYRKKLKEVWKPAV(SEQ |
| | ID NO: 59) |
| substitution | MQEIKRINKIRRRLVKDSNTKKAGKTGPMKTLLVRVMTPDLRERLENLRKKP |
| of L379R, a | ENIPQPISNTSRANLNKLLTDYTEMKKAILHVYWEEFQKDPVGLMSRVAQPA |
| substitution | PKNIDQRKLIPVKDGNERLTSSGFACSQCCQPLYVYKLEQVNDKGKPHTNYF |
| of C477K, a | GRCNVSEHERLILLSPHKPEANDELVTYSLGKFGQRALDFYSIHVTRESNHP |
| substitution | VKPLEQIGGNSCASGPVGKALSDACMGAVASFLTKYQDIIIEHQKVIKKNEK |
| of A708K, a | RLANLKDIASANGLAFPKITLPPQPHTKEGIEAYNNVVAQIVIWVNLNLWQK |
| deletion of P | LKIGRDEAKPLQRLKGFPSFPLVERQANEVDWWDMVCNVKKLINEKKEDGKV |
| at position | FWQNLAGYKRQEALRPYLSSEEDRKKGKKFARYQFGDLLLHLEKKHGEDWGK |
| 793 and a | VYDEAWERIDKKVEGLSKHIKLEEERRSEDAQSKAALTDWLRAKASFVIEGL |
| substitution | KEADKDEFKRCELKLQKWYGDLRGKPFAIEAENSILDISGFSKQYNCAFIWQ |
| of T620P of | KDGVKKLNLYLIINYFKGGKLRFKKIKPEAFEANRFYTVINKKSGEIVPMEV |
| SEQ ID | NFNFDDPNLIILPLAFGKRQGREFIWNDLLSLETGSLKLANGRVIEKPLYNR |
| NO: 2 | RTRQDEPALFVALTFERREVLDSSNIKPMNLIGIDRGENIPAVIALTDPEGC |
| | PLSRFKDSLGNPTHILRIGESYKEKQRTIQAKKEVEQRRAGGYSRKYASKAK |
| | NLADDMVRNTARDLLYYAVTQDAMLIFENLSRGFGRQGKRTFMAERQYTRME |
| | DWLTAKLAYEGLSKTYLSKTLAQYTSKTCSNCGFTITSADYDRVLEKLKKTA |
| | TGWMTTINGKELKVEGQITYYNRYKRQNVVKDLSVELDRLSEESVNNDISSW |
| | TKGRSGEALSLLKKRFSHRPVQEKFVCLNCGFETHADEQAALNIARSWLFLR |
| | SQEYKKYQTNKTTGNTDKRAFVETWQSFYRKKLKEVWKPAV (SEQ ID |
| | NO: 60) |
| substitution | MQEIKRINKIRRRLVKDSNTKKAGKTGPMKTLLVRVMTPDLRERLENLRKKP |
| of M771A of | ENIPQPISNTSRANLNKLLTDYTEMKKAILHVYWEEFQKDPVGLMSRVAQPA |
| SEQ ID | PKNIDQRKLIPVKDGNERLTSSGFACSQCCQPLYVYKLEQVNDKGKPHTNYF |
| NO: 2. | GRCNVSEHERLILLSPHKPEANDELVTYSLGKFGQRALDFYSIHVTRESNHP |
| | VKPLEQIGGNSCASGPVGKALSDACMGAVASFLTKYQDIIIEHQKVIKKNEK |
| | RLANLKDIASANGLAFPKITLPPQPHTKEGIEAYNNVVAQIVIWVNLNLWQK |
| | LKIGRDEAKPLQRLKGFPSFPLVERQANEVDWWDMVCNVKKLINEKKEDGKV |
| | FWQNLAGYKRQEALLPYLSSEEDRKKGKKFARYQFGDLLLHLEKKHGEDWGK |
| | VYDEAWERIDKKVEGLSKHIKLEEERRSEDAQSKAALTDWLRAKASFVIEGL |
| | KEADKDEFCRCELKLQKWYGDLRGKPFAIEAENSILDISGFSKQYNCAFIWQ |
| | KDGVKKLNLYLIINYFKGGKLRFKKIKPEAFEANRFYTVINKKSGEIVPMEV |
| | NFNFDDPNLIILPLAFGKRQGREFIWNDLLSLETGSLKLANGRVIEKTLYNR |
| | RTRQDEPALFVALTFERREVLDSSNIKPMNLIGIDRGENIPAVIALTDPEGC |
| | PLSRFKDSLGNPTHILRIGESYKEKQRTIQAAKEVEQRRAGGYSRKYASKAK |
| | NLADDMVRNTARDLLYYAVTQDAMLIFENLSRGFGRQGKRTFAAERQYTRME |
| | DWLTAKLAYEGLPSKTYLSKTLAQYTSKTCSNCGFTITSADYDRVLEKLKKT |
| | ATGWMTTINGKELKVEGQITYYNRYKRQNVVKDLSVELDRLSEESVNNDISS |
| | WTKGRSGEALSLLKKRFSHRPVQEKFVCLNCGFETHADEQAALNIARSWLFL |
| | RSQEYKKYQTNKTTGNTDKRAFVETWQSFYRKKLKEVWKPA (SEQ ID |
| | NO: 61) |
| substitution | MQEIKRINKIRRRLVKDSNTKKAGKTGPMKTLLVRVMTPDLRERLENLRKKP |
| of L379R, a | ENIPQPISNTSRANLNKLLTDYTEMKKAILHVYWEEFQKDPVGLMSRVAQPA |
| substitution | PKNIDQRKLIPVKDGNERLTSSGFACSQCCQPLYVYKLEQVNDKGKPHTNYF |
| of A708K, a | GRCNVSEHERLILLSPHKPEANDELVTYSLGKFGQRALDFYSIHVTRESNHP |
| deletion of P | VKPLEQIGGNSCASGPVGKALSDACMGAVASFLTKYQDIIIEHQKVIKKNEK |
| at position | RLANLKDIASANGLAFPKITLPPQPHTKEGIEAYNNVVAQIVIWVNLNLWQK |
| 793 and a | LKIGRDEAKPLQRLKGFPSFPLVERQANEVDWWDMVCNVKKLINEKKEDGKV |
| substitution | FWQNLAGYKRQEALRPYLSSEEDRKKGKKFARYQFGDLLLHLEKKHGEDWGK |
| of D732N of | VYDEAWERIDKKVEGLSKHIKLEEERRSEDAQSKAALTDWLRAKASFVIEGL |
| SEQ ID | KEADKDEFCRCELKLQKWYGDLRGKPFAIEAENSILDISGFSKQYNCAFIWQ |
| NO: 2. | KDGVKKLNLYLIINYFKGGKLRFKKIKPEAFEANRFYTVINKKSGEIVPMEV |
| | NFNFDDPNLIILPLAFGKRQGREFIWNDLLSLETGSLKLANGRVIEKTLYNR |
| | RTRQDEPALFVALTFERREVLDSSNIKPMNLIGIDRGENIPAVIALTDPEGC |
| | PLSRFKDSLGNPTHILRIGESYKEKQRTIQAKKEVEQRRAGGYSRKYASKAK |
| | NLANDMVRNTARDLLYYAVTQDAMLIFENLSRGFGRQGKRTFMAERQYTRME |
| | DWLTAKLAYEGLSKTYLSKTLAQYTSKTCSNCGFTITSADYDRVLEKLKKTA |
| | TGWMTTINGKELKVEGQITYYNRYKRQNVVKDLSVELDRLSEESVNNDISSW |
| | TKGRSGEALSLLKKRFSHRPVQEKFVCLNCGFETHADEQAALNIARSWLFLR |
| | SQEYKKYQTNKTTGNTDKRAFVETWQSFYRKKLKEVWKPAV (SEQ ID |
| | NO: 62) |
| substitution | MQEIKRINKIRRRLVKDSNTKKAGKTGPMKTLLVRVMTPDLRERLENLRKKP |
| of W782Q of | ENIPQPISNTSRANLNKLLTDYTEMKKAILHVYWEEFQKDPVGLMSRVAQPA |
| SEQ ID | PKNIDQRKLIPVKDGNERLTSSGFACSQCCQPLYVYKLEQVNDKGKPHTNYF |
| NO: 2. | GRCNVSEHERLILLSPHKPEANDELVTYSLGKFGQRALDFYSIHVTRESNHP |
| | VKPLEQIGGNSCASGPVGKALSDACMGAVASFLTKYQDIIIEHQKVIKKNEK |
| | RLANLKDIASANGLAFPKITLPPQPHTKEGIEAYNNVVAQIVIWVNLNLWQK |
| | LKIGRDEAKPLQRLKGFPSFPLVERQANEVDWWDMVCNVKKLINEKKEDGKV |
| | FWQNLAGYKRQEALLPYLSSEEDRKKGKKFARYQFGDLLLHLEKKHGEDWGK |
| | VYDEAWERIDKKVEGLSKHIKLEEERRSEDAQSKAALTDWLRAKASFVIEGL |
| | KEADKDEFCRCELKLQKWYGDLRGKPFAIEAENSILDISGFSKQYNCAFIWQ |
| | KDGVKKLNLYLIINYFKGGKLRFKKIKPEAFEANRFYTVINKKSGEIVPMEV |
| | NFNFDDPNLIILPLAFGKRQGREFIWNDLLSLETGSLKLANGRVIEKTLYNR |
| | RTRQDEPALFVALTFERREVLDSSNIKPMNLIGIDRGENIPAVIALTDPEGC |
| | PLSRFKDSLGNPTHILRIGESYKEKQRTIQAAKEVEQRRAGGYSRKYASKAK |
| | NLADDMVRNTARDLLYYAVTQDAMLIFENLSRGFGRQGKRTFMAERQYTRME |
| | DQLTAKLAYEGLPSKTYLSKTLAQYTSKTCSNCGFTITSADYDRVLEKLKKT |
| | ATGWMTTINGKELKVEGQITYYNRYKRQNVVKDLSVELDRLSEESVNNDISS |
| | WTKGRSGEALSLLKKRFSHRPVQEKFVCLNCGFETHADEQAALNIARSWLFL |
| | RSQEYKKYQTNKTTGNTDKRAFVETWQSFYRKKLKEVWKPAV (SEQ ID |
| | NO: 63) |
| substitution | MQEIKRINKIRRRLVKDSNTKKAGKTGPMKTLLVRVMTPDLRERLENLRKKP |
| of M771Q of | ENIPQPISNTSRANLNKLLTDYTEMKKAILHVYWEEFQKDPVGLMSRVAQPA |
| SEQ ID | PKNIDQRKLIPVKDGNERLTSSGFACSQCCQPLYVYKLEQVNDKGKPHTNYF |
| NO: 2 | GRCNVSEHERLILLSPHKPEANDELVTYSLGKFGQRALDFYSIHVTRESNHP |
| | VKPLEQIGGNSCASGPVGKALSDACMGAVASFLTKYQDIIIEHQKVIKKNEK |
| | RLANLKDIASANGLAFPKITLPPQPHTKEGIEAYNNVVAQIVIWVNLNLWQK |
| | LKIGRDEAKPLQRLKGFPSFPLVERQANEVDWWDMVCNVKKLINEKKEDGKV |
| | FWQNLAGYKRQEALLPYLSSEEDRKKGKKFARYQFGDLLLHLEKKHGEDWGK |
| | VYDEAWERIDKKVEGLSKHIKLEEERRSEDAQSKAALTDWLRAKASFVIEGL |
| | KEADKDEFCRCELKLQKWYGDLRGKPFAIEAENSILDISGFSKQYNCAFIWQ |
| | KDGVKKLNLYLIINYFKGGKLRFKKIKPEAFEANRFYTVINKKSGEIVPMEV |
| | NFNFDDPNLIILPLAFGKRQGREFIWNDLLSLETGSLKLANGRVIEKTLYNR |
| | RTRQDEPALFVALTFERREVLDSSNIKPMNLIGIDRGENIPAVIALTDPEGC |
| | PLSRFKDSLGNPTHILRIGESYKEKQRTIQAAKEVEQRRAGGYSRKYASKAK |
| | NLADDMVRNTARDLLYYAVTQDAMLIFENLSRGFGRQGKRTFQAERQYTRME |
| | DWLTAKLAYEGLPSKTYLSKTLAQYTSKTCSNCGFTITSADYDRVLEKLKKT |
| | ATGWMTTINGKELKVEGQITYYNRYKRQNVVKDLSVELDRLSEESVNNDISS |
| | WTKGRSGEALSLLKKRFSHRPVQEKFVCLNCGFETHADEQAALNIARSWLFL |
| | RSQEYKKYQTNKTTGNTDKRAFVETWQSFYRKKLKEVWKPAV (SEQ ID |
| | NO: 64) |
| substitution | MQEIKRINKIRRRLVKDSNTKKAGKTGPMKTLLVRVMTPDLRERLENLRKKP |
| of R458I and | ENIPQPISNTSRANLNKLLTDYTEMKKAILHVYWEEFQKDPVGLMSRVAQPA |
| a substitution | PKNIDQRKLIPVKDGNERLTSSGFACSQCCQPLYVYKLEQVNDKGKPHTNYF |
| of A739V of | GRCNVSEHERLILLSPHKPEANDELVTYSLGKFGQRALDFYSIHVTRESNHP |
| SEQ ID | VKPLEQIGGNSCASGPVGKALSDACMGAVASFLTKYQDIIIEHQKVIKKNEK |
| NO: 2. | RLANLKDIASANGLAFPKITLPPQPHTKEGIEAYNNVVAQIVIWVNLNLWQK |
| | LKIGRDEAKPLQRLKGFPSFPLVERQANEVDWWDMVCNVKKLINEKKEDGKV |
| | FWQNLAGYKRQEALLPYLSSEEDRKKGKKFARYQFGDLLLHLEKKHGEDWGK |
| | VYDEAWERIDKKVEGLSKHIKLEEERRSEDAQSKAALTDWLIAKASFVIEGL |
| | KEADKDEFCRCELKLQKWYGDLRGKPFAIEAENSILDISGFSKQYNCAFIWQ |
| | KDGVKKLNLYLIINYFKGGKLRFKKIKPEAFEANRFYTVINKKSGEIVPMEV |
| | NFNFDDPNLIILPLAFGKRQGREFIWNDLLSLETGSLKLANGRVIEKTLYNR |
| | RTRQDEPALFVALTFERREVLDSSNIKPMNLIGIDRGENIPAVIALTDPEGC |
| | PLSRFKDSLGNPTHILRIGESYKEKQRTIQAAKEVEQRRAGGYSRKYASKAK |
| | NLADDMVRNTVRDLLYYAVTQDAMLIFENLSRGFGRQGKRTFMAERQYTRME |
| | DWLTAKLAYEGLPSKTYLSKTLAQYTSKTCSNCGFTITSADYDRVLEKLKKT |
| | ATGWMTTINGKELKVEGQITYYNRYKRQNVVKDLSVELDRLSEESVNNDISS |
| | WTKGRSGEALSLLKKRFSHRPVQEKFVCLNCGFETHADEQAALNIARSWLFL |
| | RSQEYKKYQTNKTTGNTDKRAFVETWQSFYRKKLKEVWKPAV (SEQ ID |
| | NO: 65) |
| L379R, a | MQEIKRINKIRRRLVKDSNTKKAGKTGPMKTLLVRVMTPDLRERLENLRKKP |
| substitution | ENIPQPISNTSRANLNKLLTDYTEMKKAILHVYWEEFQKDPVGLMSRVAQPA |
| of A708K, a | PKNIDQRKLIPVKDGNERLTSSGFACSQCCQPLYVYKLEQVNDKGKPHTNYF |
| deletion of P | GRCNVSEHERLILLSPHKPEANDELVTYSLGKFGQRALDFYSIHVTRESNHP |
| at position | VKPLEQIGGNSCASGPVGKALSDACMGAVASFLTKYQDIIIEHQKVIKKNEK |
| 793 and a | RLANLKDIASANGLAFPKITLPPQPHTKEGIEAYNNVVAQIVIWVNLNLWQK |
| substitution | LKIGRDEAKPLQRLKGFPSFPLVERQANEVDWWDMVCNVKKLINEKKEDGKV |
| of M771N of | FWQNLAGYKRQEALRPYLSSEEDRKKGKKFARYQFGDLLLHLEKKHGEDWGK |
| SEQ ID | VYDEAWERIDKKVEGLSKHIKLEEERRSEDAQSKAALTDWLRAKASFVIEGL |
| NO: 2 | KEADKDEFCRCELKLQKWYGDLRGKPFAIEAENSILDISGFSKQYNCAFIWQ |
| | KDGVKKLNLYLIINYFKGGKLRFKKIKPEAFEANRFYTVINKKSGEIVPMEV |
| | NFNFDDPNLIILPLAFGKRQGREFIWNDLLSLETGSLKLANGRVIEKTLYNR |
| | RTRQDEPALFVALTFERREVLDSSNIKPMNLIGIDRGENIPAVIALTDPEGC |
| | PLSRFKDSLGNPTHILRIGESYKEKQRTIQAKKEVEQRRAGGYSRKYASKAK |
| | NLADDMVRNTARDLLYYAVTQDAMLIFENLSRGFGRQGKRTFNAERQYTRME |
| | DWLTAKLAYEGLSKTYLSKTLAQYTSKTCSNCGFTITSADYDRVLEKLKKTA |
| | TGWMTTINGKELKVEGQITYYNRYKRQNVVKDLSVELDRLSEESVNNDISSW |
| | TKGRSGEALSLLKKRFSHRPVQEKFVCLNCGFETHADEQAALNIARSWLFLR |
| | SQEYKKYQTNKTTGNTDKRAFVETWQSFYRKKLKEVWKPAV (SEQ ID |
| | NO: 66) |
| substitution | MQEIKRINKIRRRLVKDSNTKKAGKTGPMKTLLVRVMTPDLRERLENLRKKP |
| of L379R, a | ENIPQPISNTSRANLNKLLTDYTEMKKAILHVYWEEFQKDPVGLMSRVAQPA |
| substitution | PKNIDQRKLIPVKDGNERLTSSGFACSQCCQPLYVYKLEQVNDKGKPHTNYF |
| of A708K, a | GRCNVSEHERLILLSPHKPEANDELVTYSLGKFGQRALDFYSIHVTRESNHP |
| deletion of P | VKPLEQIGGNSCASGPVGKALSDACMGAVASFLTKYQDIIIEHQKVIKKNEK |
| at position | RLANLKDIASANGLAFPKITLPPQPHTKEGIEAYNNVVAQIVIWVNLNLWQK |
| 793 and a | LKIGRDEAKPLQRLKGFPSFPLVERQANEVDWWDMVCNVKKLINEKKEDGKV |
| substitution | FWQNLAGYKRQEALRPYLSSEEDRKKGKKFARYQFGDLLLHLEKKHGEDWGK |
| of A739T of | VYDEAWERIDKKVEGLSKHIKLEEERRSEDAQSKAALTDWLRAKASFVIEGL |
| SEQ ID | KEADKDEFCRCELKLQKWYGDLRGKPFAIEAENSILDISGFSKQYNCAFIWQ |
| NO: 2 | KDGVKKLNLYLIINYFKGGKLRFKKIKPEAFEANRFYTVINKKSGEIVPMEV |
| | NFNFDDPNLIILPLAFGKRQGREFIWNDLLSLETGSLKLANGRVIEKTLYNR |
| | RTRQDEPALFVALTFERREVLDSSNIKPMNLIGIDRGENIPAVIALTDPEGC |
| | PLSRFKDSLGNPTHILRIGESYKEKQRTIQAKKEVEQRRAGGYSRKYASKAK |
| | NLADDMVRNTTRDLLYYAVTQDAMLIFENLSRGFGRQGKRTFMAERQYTRME |
| | DWLTAKLAYEGLSKTYLSKTLAQYTSKTCSNCGFTITSADYDRVLEKLKKTA |
| | TGWMTTINGKELKVEGQITYYNRYKRQNVVKDLSVELDRLSEESVNNDISSW |
| | TKGRSGEALSLLKKRFSHRPVQEKFVCLNCGFETHADEQAALNIARSWLFLR |
| | SQEYKKYQTNKTTGNTDKRAFVETWQSFYRKKLKEVWKPAV (SEQ ID |
| | NO: 67) |
| substitution | MQEIKRINKIRRRLVKDSNTKKAGKTGPMKTLLVRVMTPDLRERLENLRKKP |
| of L379R, a | ENIPQPISNTSRANLNKLLTDYTEMKKAILHVYWEEFQKDPVGLMSRVAQPA |
| substitution | PKNIDQRKLIPVKDGNERLTSSGFACSQCCQPLYVYKLEQVNDKGKPHTNYF |
| of C477K, a | GRCNVSEHERLILLSPHKPEANDELVTYSLGKFGQRALDFYSIHVTRESNHP |
| substitution | VKPLEQIGGNSCASGPVGKALSDACMGAVASFLTKYQDIIIEHQKVIKKNEK |
| of A708K, a | RLANLKDIASANGLAFPKITLPPQPHTKEGIEAYNNVVAQIVIWVNLNLWQK |
| deletion of P | LKIGRDEAKPLQRLKGFPSFPLVERQANEVDWWDMVCNVKKLINEKKEDGKV |
| at position | FWQNLAGYKRQEALRPYLSSEEDRKKGKKFARYQFGDLLLHLEKKHGEDWGK |
| 793 and a | VYDEAWERIDKKVEGLSKHIKLEEERRSEDAQSKAALTDWLRAKASFVIEGL |
| substitution | KEADKDEFKRCELKLQKWYGSLRGKPFAIEAENSILDISGFSKQYNCAFIWQ |
| of D489S of | KDGVKKLNLYLIINYFKGGKLRFKKIKPEAFEANRFYTVINKKSGEIVPMEV |
| SEQ ID | NFNFDDPNLIILPLAFGKRQGREFIWNDLLSLETGSLKLANGRVIEKTLYNR |
| NO: 2. | RTRQDEPALFVALTFERREVLDSSNIKPMNLIGIDRGENIPAVIALTDPEGC |
| | PLSRFKDSLGNPTHILRIGESYKEKQRTIQAKKEVEQRRAGGYSRKYASKAK |
| | NLADDMVRNTARDLLYYAVTQDAMLIFENLSRGFGRQGKRTFMAERQYTRME |
| | DWLTAKLAYEGLSKTYLSKTLAQYTSKTCSNCGFTITSADYDRVLEKLKKTA |
| | TGWMTTINGKELKVEGQITYYNRYKRQNVVKDLSVELDRLSEESVNNDISSW |
| | TKGRSGEALSLLKKRFSHRPVQEKFVCLNCGFETHADEQAALNIARSWLFLR |
| | SQEYKKYQTNKTTGNTDKRAFVETWQSFYRKKLKEVWKPAV (SEQ ID |
| | NO: 68) |
| substitution | MQEIKRINKIRRRLVKDSNTKKAGKTGPMKTLLVRVMTPDLRERLENLRKKP |
| of L379R, a | ENIPQPISNTSRANLNKLLTDYTEMKKAILHVYWEEFQKDPVGLMSRVAQPA |
| substitution | PKNIDQRKLIPVKDGNERLTSSGFACSQCCQPLYVYKLEQVNDKGKPHTNYF |
| of C477K, a | GRCNVSEHERLILLSPHKPEANDELVTYSLGKFGQRALDFYSIHVTRESNHP |
| substitution | VKPLEQIGGNSCASGPVGKALSDACMGAVASFLTKYQDIIIEHQKVIKKNEK |
| of A708K, a | RLANLKDIASANGLAFPKITLPPQPHTKEGIEAYNNVVAQIVIWVNLNLWQK |
| deletion of P | LKIGRDEAKPLQRLKGFPSFPLVERQANEVDWWDMVCNVKKLINEKKEDGKV |
| at position | FWQNLAGYKRQEALRPYLSSEEDRKKGKKFARYQFGDLLLHLEKKHGEDWGK |
| 793 and a | VYDEAWERIDKKVEGLSKHIKLEEERRSEDAQSKAALTDWLRAKASFVIEGL |
| substitution | KEADKDEFKRCELKLQKWYGDLRGKPFAIEAENSILDISGFSKQYNCAFIWQ |
| of D732N of | KDGVKKLNLYLIINYFKGGKLRFKKIKPEAFEANRFYTVINKKSGEIVPMEV |
| SEQ ID | NFNFDDPNLIILPLAFGKRQGREFIWNDLLSLETGSLKLANGRVIEKTLYNR |
| NO: 2. | RTRQDEPALFVALTFERREVLDSSNIKPMNLIGIDRGENIPAVIALTDPEGC |
| | PLSRFKDSLGNPTHILRIGESYKEKQRTIQAKKEVEQRRAGGYSRKYASKAK |
| | NLANDMVRNTARDLLYYAVTQDAMLIFENLSRGFGRQGKRTFMAERQYTRME |
| | DWLTAKLAYEGLSKTYLSKTLAQYTSKTCSNCGFTITSADYDRVLEKLKKTA |
| | TGWMTTINGKELKVEGQITYYNRYKRQNVVKDLSVELDRLSEESVNNDISSW |
| | TKGRSGEALSLLKKRFSHRPVQEKFVCLNCGFETHADEQAALNIARSWLFLR |
| | SQEYKKYQTNKTTGNTDKRAFVETWQSFYRKKLKEVWKPAV (SEQ ID |
| | NO: 69) |
| substitution | MQEIKRINKIRRRLVKDSNTKKAGKTGPMKTLLVRVMTPDLRERLENLRKKP |
| of V711K of | ENIPQPISNTSRANLNKLLTDYTEMKKAILHVYWEEFQKDPVGLMSRVAQPA |
| SEQ ID | PKNIDQRKLIPVKDGNERLTSSGFACSQCCQPLYVYKLEQVNDKGKPHTNYF |
| NO: 2. | GRCNVSEHERLILLSPHKPEANDELVTYSLGKFGQRALDFYSIHVTRESNHP |
| | VKPLEQIGGNSCASGPVGKALSDACMGAVASFLTKYQDIIIEHQKVIKKNEK |
| | RLANLKDIASANGLAFPKITLPPQPHTKEGIEAYNNVVAQIVIWVNLNLWQK |
| | LKIGRDEAKPLQRLKGFPSFPLVERQANEVDWWDMVCNVKKLINEKKEDGKV |
| | FWQNLAGYKRQEALLPYLSSEEDRKKGKKFARYQFGDLLLHLEKKHGEDWGK |
| | VYDEAWERIDKKVEGLSKHIKLEEERRSEDAQSKAALTDWLRAKASFVIEGL |
| | KEADKDEFCRCELKLQKWYGDLRGKPFAIEAENSILDISGFSKQYNCAFIWQ |
| | KDGVKKLNLYLIINYFKGGKLRFKKIKPEAFEANRFYTVINKKSGEIVPMEV |
| | NFNFDDPNLIILPLAFGKRQGREFIWNDLLSLETGSLKLANGRVIEKTLYNR |
| | RTRQDEPALFVALTFERREVLDSSNIKPMNLIGIDRGENIPAVIALTDPEGC |
| | PLSRFKDSLGNPTHILRIGESYKEKQRTIQAAKEKEQRRAGGYSRKYASKAK |
| | NLADDMVRNTARDLLYYAVTQDAMLIFENLSRGFGRQGKRTFMAERQYTRME |
| | DWLTAKLAYEGLPSKTYLSKTLAQYTSKTCSNCGFTITSADYDRVLEKLKKT |
| | ATGWMTTINGKELKVEGQITYYNRYKRQNVVKDLSVELDRLSEESVNNDISS |
| | WTKGRSGEALSLLKKRFSHRPVQEKFVCLNCGFETHADEQAALNIARSWLFL |
| | RSQEYKKYQTNKTTGNTDKRAFVETWQSFYRKKLKEVWKPAV (SEQ ID |
| | NO: 70) |
| substitution | MQEIKRINKIRRRLVKDSNTKKAGKTGPMKTLLVRVMTPDLRERLENLRKKP |
| of L379R, a | ENIPQPISNTSRANLNKLLTDYTEMKKAILHVYWEEFQKDPVGLMSRVAQPA |
| substitution | PKNIDQRKLIPVKDGNERLTSSGFACSQCCQPLYVYKLEQVNDKGKPHTNYF |
| of C477K, a | GRCNVSEHERLILLSPHKPEANDELVTYSLGKFGQRALDFYSIHVTRESNHP |
| substitution | VKPLEQIGGNSCASGPVGKALSDACMGAVASFLTKYQDIIIEHQKVIKKNEK |
| of A708K, a | RLANLKDIASANGLAFPKITLPPQPHTKEGIEAYNNVVAQIVIWVNLNLWQK |
| deletion of P | LKIGRDEAKPLQRLKGFPSFPLVERQANEVDWWDMVCNVKKLINEKKEDGKV |
| at position | FWQNLAGYKRQEALRPYLSSEEDRKKGKKFARYQFGDLLLHLEKKHGEDWGK |
| 793 and a | VYDEAWERIDKKVEGLSKHIKLEEERRSEDAQSKAALTDWLRAKASFVIEGL |
| substitution | KEADKDEFKRCELKLQKWYGDLRGKPFAIEAENSILDISGFSKQYNCAFIWQ |
| of Y797L of | KDGVKKLNLYLIINYFKGGKLRFKKIKPEAFEANRFYTVINKKSGEIVPMEV |
| SEQ ID | NFNFDDPNLIILPLAFGKRQGREFIWNDLLSLETGSLKLANGRVIEKTLYNR |
| NO: 2. | RTRQDEPALFVALTFERREVLDSSNIKPMNLIGIDRGENIPAVIALTDPEGC |
| | PLSRFKDSLGNPTHILRIGESYKEKQRTIQAKKEVEQRRAGGYSRKYASKAK |
| | NLADDMVRNTARDLLYYAVTQDAMLIFENLSRGFGRQGKRTFMAERQYTRME |
| | DWLTAKLAYEGLSKTLLSKTLAQYTSKTCSNCGFTITSADYDRVLEKLKKTA |
| | TGWMTTINGKELKVEGQITYYNRYKRQNVVKDLSVELDRLSEESVNNDISSW |
| | TKGRSGEALSLLKKRFSHRPVQEKFVCLNCGFETHADEQAALNIARSWLFLR |
| | SQEYKKYQTNKTTGNTDKRAFVETWQSFYRKKLKEVWKPAV (SEQ ID |
| | NO: 71) |
| 119: | MQEIKRINKIRRRLVKDSNTKKAGKTGPMKTLLVRVMTPDLRERLENLRKKP |
| substitution | ENIPQPISNTSRANLNKLLTDYTEMKKAILHVYWEEFQKDPVGLMSRVAQPA |
| of L379R, a | PKNIDQRKLIPVKDGNERLTSSGFACSQCCQPLYVYKLEQVNDKGKPHTNYF |
| substitution | GRCNVSEHERLILLSPHKPEANDELVTYSLGKFGQRALDFYSIHVTRESNHP |
| of A708K | VKPLEQIGGNSCASGPVGKALSDACMGAVASFLTKYQDIIIEHQKVIKKNEK |
| and a | RLANLKDIASANGLAFPKITLPPQPHTKEGIEAYNNVVAQIVIWVNLNLWQK |
| deletion of P | LKIGRDEAKPLQRLKGFPSFPLVERQANEVDWWDMVCNVKKLINEKKEDGKV |
| at position | FWQNLAGYKRQEALRPYLSSEEDRKKGKKFARYQFGDLLLHLEKKHGEDWGK |
| 793 of SEQ | VYDEAWERIDKKVEGLSKHIKLEEERRSEDAQSKAALTDWLRAKASFVIEGL |
| IDNO: 2. | KEADKDEFCRCELKLQKWYGDLRGKPFAIEAENSILDISGFSKQYNCAFIWQ |
| | KDGVKKLNLYLIINYFKGGKLRFKKIKPEAFEANRFYTVINKKSGEIVPMEV |
| | NFNFDDPNLIILPLAFGKRQGREFIWNDLLSLETGSLKLANGRVIEKTLYNR |
| | RTRQDEPALFVALTFERREVLDSSNIKPMNLIGIDRGENIPAVIALTDPEGC |
| | PLSRFKDSLGNPTHILRIGESYKEKQRTIQAKKEVEQRRAGGYSRKYASKAK |
| | NLADDMVRNTARDLLYYAVTQDAMLIFENLSRGFGRQGKRTFMAERQYTRME |
| | DWLTAKLAYEGLSKTYLSKTLAQYTSKTCSNCGFTITSADYDRVLEKLKKTA |
| | TGWMTTINGKELKVEGQITYYNRYKRQNVVKDLSVELDRLSEESVNNDISSW |
| | TKGRSGEALSLLKKRFSHRPVQEKFVCLNCGFETHADEQAALNIARSWLFLR |
| | SQEYKKYQTNKTTGNTDKRAFVETWQSFYRKKLKEVWKPAV (SEQ ID |
| | NO: 72) |
| substitution | MQEIKRINKIRRRLVKDSNTKKAGKTGPMKTLLVRVMTPDLRERLENLRKKP |
| of L379R, a | ENIPQPISNTSRANLNKLLTDYTEMKKAILHVYWEEFQKDPVGLMSRVAQPA |
| substitution | PKNIDQRKLIPVKDGNERLTSSGFACSQCCQPLYVYKLEQVNDKGKPHTNYF |
| of C477K, a | GRCNVSEHERLILLSPHKPEANDELVTYSLGKFGQRALDFYSIHVTRESNHP |
| substitution | VKPLEQIGGNSCASGPVGKALSDACMGAVASFLTKYQDIIIEHQKVIKKNEK |
| of A708K, a | RLANLKDIASANGLAFPKITLPPQPHTKEGIEAYNNVVAQIVIWVNLNLWQK |
| deletion of P | LKIGRDEAKPLQRLKGFPSFPLVERQANEVDWWDMVCNVKKLINEKKEDGKV |
| at position | FWQNLAGYKRQEALRPYLSSEEDRKKGKKFARYQFGDLLLHLEKKHGEDWGK |
| 793 and a | VYDEAWERIDKKVEGLSKHIKLEEERRSEDAQSKAALTDWLRAKASFVIEGL |
| substitution | KEADKDEFKRCELKLQKWYGDLRGKPFAIEAENSILDISGFSKQYNCAFIWQ |
| of M771N of | KDGVKKLNLYLIINYFKGGKLRFKKIKPEAFEANRFYTVINKKSGEIVPMEV |
| SEQ ID | NFNFDDPNLIILPLAFGKRQGREFIWNDLLSLETGSLKLANGRVIEKTLYNR |
| NO: 2. | RTRQDEPALFVALTFERREVLDSSNIKPMNLIGIDRGENIPAVIALTDPEGC |
| | PLSRFKDSLGNPTHILRIGESYKEKQRTIQAKKEVEQRRAGGYSRKYASKAK |
| | NLADDMVRNTARDLLYYAVTQDAMLIFENLSRGFGRQGKRTFNAERQYTRME |
| | DWLTAKLAYEGLSKTYLSKTLAQYTSKTCSNCGFTITSADYDRVLEKLKKTA |
| | TGWMTTINGKELKVEGQITYYNRYKRQNVVKDLSVELDRLSEESVNNDISSW |
| | TKGRSGEALSLLKKRFSHRPVQEKFVCLNCGFETHADEQAALNIARSWLFLR |
| | SQEYKKYQTNKTTGNTDKRAFVETWQSFYRKKLKEVWKPAV (SEQ ID |
| | NO: 73) |
| substitution | MQEIKRINKIRRRLVKDSNTKKAGKTGPMKTLLVRVMTPDLRERLENLRKKP |
| of A708K, a | ENIPQPISNTSRANLNKLLTDYTEMKKAILHVYWEEFQKDPVGLMSRVAQPA |
| deletion of P | PKNIDQRKLIPVKDGNERLTSSGFACSQCCQPLYVYKLEQVNDKGKPHTNYF |
| at position | GRCNVSEHERLILLSPHKPEANDELVTYSLGKFGQRALDFYSIHVTRESNHP |
| 793 and a | VKPLEQIGGNSCASGPVGKALSDACMGAVASFLTKYQDIIIEHQKVIKKNEK |
| substitution | RLANLKDIASANGLAFPKITLPPQPHTKEGIEAYNNVVAQIVIWVNLNLWQK |
| of E386S of | LKIGRDEAKPLQRLKGFPSFPLVERQANEVDWWDMVCNVKKLINEKKEDGKV |
| SEQ ID | FWQNLAGYKRQEALLPYLSSESDRKKGKKFARYQFGDLLLHLEKKHGEDWGK |
| NO: 2. | VYDEAWERIDKKVEGLSKHIKLEEERRSEDAQSKAALTDWLRAKASFVIEGL |
| | KEADKDEFCRCELKLQKWYGDLRGKPFAIEAENSILDISGFSKQYNCAFIWQ |
| | KDGVKKLNLYLIINYFKGGKLRFKKIKPEAFEANRFYTVINKKSGEIVPMEV |
| | NFNFDDPNLIILPLAFGKRQGREFIWNDLLSLETGSLKLANGRVIEKTLYNR |
| | RTRQDEPALFVALTFERREVLDSSNIKPMNLIGIDRGENIPAVIALTDPEGC |
| | PLSRFKDSLGNPTHILRIGESYKEKQRTIQAKKEVEQRRAGGYSRKYASKAK |
| | NLADDMVRNTARDLLYYAVTQDAMLIFENLSRGFGRQGKRTFMAERQYTRME |
| | DWLTAKLAYEGLSKTYLSKTLAQYTSKTCSNCGFTITSADYDRVLEKLKKTA |
| | TGWMTTINGKELKVEGQITYYNRYKRQNVVKDLSVELDRLSEESVNNDISSW |
| | TKGRSGEALSLLKKRFSHRPVQEKFVCLNCGFETHADEQAALNIARSWLFLR |
| | SQEYKKYQTNKTTGNTDKRAFVETWQSFYRKKLKEVWKPAV (SEQ ID |
| | NO: 74) |
| substitution | MQEIKRINKIRRRLVKDSNTKKAGKTGPMKTLLVRVMTPDLRERLENLRKKP |
| of L379R, a | ENIPQPISNTSRANLNKLLTDYTEMKKAILHVYWEEFQKDPVGLMSRVAQPA |
| substitution | PKNIDQRKLIPVKDGNERLTSSGFACSQCCQPLYVYKLEQVNDKGKPHTNYF |
| of C477K, a | GRCNVSEHERLILLSPHKPEANDELVTYSLGKFGQRALDFYSIHVTRESNHP |
| substitution | VKPLEQIGGNSCASGPVGKALSDACMGAVASFLTKYQDIIIEHQKVIKKNEK |
| of A708K | RLANLKDIASANGLAFPKITLPPQPHTKEGIEAYNNVVAQIVIWVNLNLWQK |
| and a | LKIGRDEAKPLQRLKGFPSFPLVERQANEVDWWDMVCNVKKLINEKKEDGKV |
| deletion of P | FWQNLAGYKRQEALRPYLSSEEDRKKGKKFARYQFGDLLLHLEKKHGEDWGK |
| at position | VYDEAWERIDKKVEGLSKHIKLEEERRSEDAQSKAALTDWLRAKASFVIEGL |
| 793 of SEQ | KEADKDEFKRCELKLQKWYGDLRGKPFAIEAENSILDISGFSKQYNCAFIWQ |
| IDNO: 2. | KDGVKKLNLYLIINYFKGGKLRFKKIKPEAFEANRFYTVINKKSGEIVPMEV |
| | NFNFDDPNLIILPLAFGKRQGREFIWNDLLSLETGSLKLANGRVIEKTLYNR |
| | RTRQDEPALFVALTFERREVLDSSNIKPMNLIGIDRGENIPAVIALTDPEGC |
| | PLSRFKDSLGNPTHILRIGESYKEKQRTIQAKKEVEQRRAGGYSRKYASKAK |
| | NLADDMVRNTARDLLYYAVTQDAMLIFENLSRGFGRQGKRTFMAERQYTRME |
| | DWLTAKLAYEGLSKTYLSKTLAQYTSKTCSNCGFTITSADYDRVLEKLKKTA |
| | TGWMTTINGKELKVEGQITYYNRYKRQNVVKDLSVELDRLSEESVNNDISSW |
| | TKGRSGEALSLLKKRFSHRPVQEKFVCLNCGFETHADEQAALNIARSWLFLR |
| | SQEYKKYQTNKTTGNTDKRAFVETWQSFYRKKLKEVWKPAV (SEQ ID |
| | NO: 75) |
| substitution | MQEIKRINKIRRRLVKDSNTKKAGKTGPMKTLLVRVMTPDLRERLENLRKKP |
| of L792D of | ENIPQPISNTSRANLNKLLTDYTEMKKAILHVYWEEFQKDPVGLMSRVAQPA |
| SEQ ID | PKNIDQRKLIPVKDGNERLTSSGFACSQCCQPLYVYKLEQVNDKGKPHTNYF |
| NO: 2. | GRCNVSEHERLILLSPHKPEANDELVTYSLGKFGQRALDFYSIHVTRESNHP |
| | VKPLEQIGGNSCASGPVGKALSDACMGAVASFLTKYQDIIIEHQKVIKKNEK |
| | RLANLKDIASANGLAFPKITLPPQPHTKEGIEAYNNVVAQIVIWVNLNLWQK |
| | LKIGRDEAKPLQRLKGFPSFPLVERQANEVDWWDMVCNVKKLINEKKEDGKV |
| | FWQNLAGYKRQEALLPYLSSEEDRKKGKKFARYQFGDLLLHLEKKHGEDWGK |
| | VYDEAWERIDKKVEGLSKHIKLEEERRSEDAQSKAALTDWLRAKASFVIEGL |
| | KEADKDEFCRCELKLQKWYGDLRGKPFAIEAENSILDISGFSKQYNCAFIWQ |
| | KDGVKKLNLYLIINYFKGGKLRFKKIKPEAFEANRFYTVINKKSGEIVPMEV |
| | NFNFDDPNLIILPLAFGKRQGREFIWNDLLSLETGSLKLANGRVIEKTLYNR |
| | RTRQDEPALFVALTFERREVLDSSNIKPMNLIGIDRGENIPAVIALTDPEGC |
| | PLSRFKDSLGNPTHILRIGESYKEKQRTIQAAKEVEQRRAGGYSRKYASKAK |
| | NLADDMVRNTARDLLYYAVTQDAMLIFENLSRGFGRQGKRTFMAERQYTRME |
| | DWLTAKLAYEGDPSKTYLSKTLAQYTSKTCSNCGFTITSADYDRVLEKLKKT |
| | ATGWMTTINGKELKVEGQITYYNRYKRQNVVKDLSVELDRLSEESVNNDISS |
| | WTKGRSGEALSLLKKRFSHRPVQEKFVCLNCGFETHADEQAALNIARSWLFL |
| | RSQEYKKYQTNKTTGNTDKRAFVETWQSFYRKKLKEVWKPAV (SEQ ID |
| | NO: 76) |
| substitution | MQEIKRINKIRRRLVKDSNTKKAGKTGPMKTLLVRVMTPDLRERLENLRKKP |
| of G791F of | ENIPQPISNTSRANLNKLLTDYTEMKKAILHVYWEEFQKDPVGLMSRVAQPA |
| SEQ ID | PKNIDQRKLIPVKDGNERLTSSGFACSQCCQPLYVYKLEQVNDKGKPHTNYF |
| NO: 2. | GRCNVSEHERLILLSPHKPEANDELVTYSLGKFGQRALDFYSIHVTRESNHP |
| | VKPLEQIGGNSCASGPVGKALSDACMGAVASFLTKYQDIIIEHQKVIKKNEK |
| | RLANLKDIASANGLAFPKITLPPQPHTKEGIEAYNNVVAQIVIWVNLNLWQK |
| | LKIGRDEAKPLQRLKGFPSFPLVERQANEVDWWDMVCNVKKLINEKKEDGKV |
| | FWQNLAGYKRQEALLPYLSSEEDRKKGKKFARYQFGDLLLHLEKKHGEDWGK |
| | VYDEAWERIDKKVEGLSKHIKLEEERRSEDAQSKAALTDWLRAKASFVIEGL |
| | KEADKDEFCRCELKLQKWYGDLRGKPFAIEAENSILDISGFSKQYNCAFIWQ |
| | KDGVKKLNLYLIINYFKGGKLRFKKIKPEAFEANRFYTVINKKSGEIVPMEV |
| | NFNFDDPNLIILPLAFGKRQGREFIWNDLLSLETGSLKLANGRVIEKTLYNR |
| | RTRQDEPALFVALTFERREVLDSSNIKPMNLIGIDRGENIPAVIALTDPEGC |
| | PLSRFKDSLGNPTHILRIGESYKEKQRTIQAAKEVEQRRAGGYSRKYASKAK |
| | NLADDMVRNTARDLLYYAVTQDAMLIFENLSRGFGRQGKRTFMAERQYTRME |
| | DWLTAKLAYEFLPSKTYLSKTLAQYTSKTCSNCGFTITSADYDRVLEKLKKT |
| | ATGWMTTINGKELKVEGQITYYNRYKRQNVVKDLSVELDRLSEESVNNDISS |
| | WTKGRSGEALSLLKKRFSHRPVQEKFVCLNCGFETHADEQAALNIARSWLFL |
| | RSQEYKKYQTNKTTGNTDKRAFVETWQSFYRKKLKEVWKPAV (SEQ ID |
| | NO: 77) |
| substitution | MQEIKRINKIRRRLVKDSNTKKAGKTGPMKTLLVRVMTPDLRERLENLRKKP |
| of A708K, a | ENIPQPISNTSRANLNKLLTDYTEMKKAILHVYWEEFQKDPVGLMSRVAQPA |
| deletion of P | PKNIDQRKLIPVKDGNERLTSSGFACSQCCQPLYVYKLEQVNDKGKPHTNYF |
| at position | GRCNVSEHERLILLSPHKPEANDELVTYSLGKFGQRALDFYSIHVTRESNHP |
| 793 and a | VKPLEQIGGNSCASGPVGKALSDACMGAVASFLTKYQDIIIEHQKVIKKNEK |
| substitution | RLANLKDIASANGLAFPKITLPPQPHTKEGIEAYNNVVAQIVIWVNLNLWQK |
| of A739V of | LKIGRDEAKPLQRLKGFPSFPLVERQANEVDWWDMVCNVKKLINEKKEDGKV |
| SEQ ID | FWQNLAGYKRQEALLPYLSSEEDRKKGKKFARYQFGDLLLHLEKKHGEDWGK |
| NO: 2. | VYDEAWERIDKKVEGLSKHIKLEEERRSEDAQSKAALTDWLRAKASFVIEGL |
| | KEADKDEFCRCELKLQKWYGDLRGKPFAIEAENSILDISGFSKQYNCAFIWQ |
| | KDGVKKLNLYLIINYFKGGKLRFKKIKPEAFEANRFYTVINKKSGEIVPMEV |
| | NFNFDDPNLIILPLAFGKRQGREFIWNDLLSLETGSLKLANGRVIEKTLYNR |
| | RTRQDEPALFVALTFERREVLDSSNIKPMNLIGIDRGENIPAVIALTDPEGC |
| | PLSRFKDSLGNPTHILRIGESYKEKQRTIQAKKEVEQRRAGGYSRKYASKAK |
| | NLADDMVRNTVRDLLYYAVTQDAMLIFENLSRGFGRQGKRTFMAERQYTRME |
| | DWLTAKLAYEGLSKTYLSKTLAQYTSKTCSNCGFTITSADYDRVLEKLKKTA |
| | TGWMTTINGKELKVEGQITYYNRYKRQNVVKDLSVELDRLSEESVNNDISSW |
| | TKGRSGEALSLLKKRFSHRPVQEKFVCLNCGFETHADEQAALNIARSWLFLR |
| | SQEYKKYQTNKTTGNTDKRAFVETWQSFYRKKLKEVWKPAV (SEQ ID |
| | NO: 78) |
| substitution | MQEIKRINKIRRRLVKDSNTKKAGKTGPMKTLLVRVMTPDLRERLENLRKKP |
| of L379R, a | ENIPQPISNTSRANLNKLLTDYTEMKKAILHVYWEEFQKDPVGLMSRVAQPA |
| substitution | PKNIDQRKLIPVKDGNERLTSSGFACSQCCQPLYVYKLEQVNDKGKPHTNYF |
| of A708K, a | GRCNVSEHERLILLSPHKPEANDELVTYSLGKFGQRALDFYSIHVTRESNHP |
| deletion of P | VKPLEQIGGNSCASGPVGKALSDACMGAVASFLTKYQDIIIEHQKVIKKNEK |
| at position | RLANLKDIASANGLAFPKITLPPQPHTKEGIEAYNNVVAQIVIWVNLNLWQK |
| 793 and a | LKIGRDEAKPLQRLKGFPSFPLVERQANEVDWWDMVCNVKKLINEKKEDGKV |
| substitution | FWQNLAGYKRQEALRPYLSSEEDRKKGKKFARYQFGDLLLHLEKKHGEDWGK |
| of A739V of | VYDEAWERIDKKVEGLSKHIKLEEERRSEDAQSKAALTDWLRAKASFVIEGL |
| SEQ ID | KEADKDEFCRCELKLQKWYGDLRGKPFAIEAENSILDISGFSKQYNCAFIWQ |
| NO: 2. | KDGVKKLNLYLIINYFKGGKLRFKKIKPEAFEANRFYTVINKKSGEIVPMEV |
| | NFNFDDPNLIILPLAFGKRQGREFIWNDLLSLETGSLKLANGRVIEKTLYNR |
| | RTRQDEPALFVALTFERREVLDSSNIKPMNLIGIDRGENIPAVIALTDPEGC |
| | PLSRFKDSLGNPTHILRIGESYKEKQRTIQAKKEVEQRRAGGYSRKYASKAK |
| | NLADDMVRNTVRDLLYYAVTQDAMLIFENLSRGFGRQGKRTFMAERQYTRME |
| | DWLTAKLAYEGLSKTYLSKTLAQYTSKTCSNCGFTITSADYDRVLEKLKKTA |
| | TGWMTTINGKELKVEGQITYYNRYKRQNVVKDLSVELDRLSEESVNNDISSW |
| | TKGRSGEALSLLKKRFSHRPVQEKFVCLNCGFETHADEQAALNIARSWLFLR |
| | SQEYKKYQTNKTTGNTDKRAFVETWQSFYRKKLKEVWKPAV (SEQ ID |
| | NO: 79) |
| substitution | MQEIKRINKIRRRLVKDSNTKKAGKTGPMKTLLVRVMTPDLRERLENLRKKP |
| of C477K, a | ENIPQPISNTSRANLNKLLTDYTEMKKAILHVYWEEFQKDPVGLMSRVAQPA |
| substitution | PKNIDQRKLIPVKDGNERLTSSGFACSQCCQPLYVYKLEQVNDKGKPHTNYF |
| of A708K | GRCNVSEHERLILLSPHKPEANDELVTYSLGKFGQRALDFYSIHVTRESNHP |
| and a | VKPLEQIGGNSCASGPVGKALSDACMGAVASFLTKYQDIIIEHQKVIKKNEK |
| deletion of P | RLANLKDIASANGLAFPKITLPPQPHTKEGIEAYNNVVAQIVIWVNLNLWQK |
| at position | LKIGRDEAKPLQRLKGFPSFPLVERQANEVDWWDMVCNVKKLINEKKEDGKV |
| 793 of SEQ | FWQNLAGYKRQEALLPYLSSEEDRKKGKKFARYQFGDLLLHLEKKHGEDWGK |
| ID NO: 2. | VYDEAWERIDKKVEGLSKHIKLEEERRSEDAQSKAALTDWLRAKASFVIEGL |
| | KEADKDEFKRCELKLQKWYGDLRGKPFAIEAENSILDISGFSKQYNCAFIWQ |
| | KDGVKKLNLYLIINYFKGGKLRFKKIKPEAFEANRFYTVINKKSGEIVPMEV |
| | NFNFDDPNLIILPLAFGKRQGREFIWNDLLSLETGSLKLANGRVIEKTLYNR |
| | RTRQDEPALFVALTFERREVLDSSNIKPMNLIGIDRGENIPAVIALTDPEGC |
| | PLSRFKDSLGNPTHILRIGESYKEKQRTIQAKKEVEQRRAGGYSRKYASKAK |
| | NLADDMVRNTARDLLYYAVTQDAMLIFENLSRGFGRQGKRTFMAERQYTRME |
| | DWLTAKLAYEGLSKTYLSKTLAQYTSKTCSNCGFTITSADYDRVLEKLKKTA |
| | TGWMTTINGKELKVEGQITYYNRYKRQNVVKDLSVELDRLSEESVNNDISSW |
| | TKGRSGEALSLLKKRFSHRPVQEKFVCLNCGFETHADEQAALNIARSWLFLR |
| | SQEYKKYQTNKTTGNTDKRAFVETWQSFYRKKLKEVWKPAV (SEQ ID |
| | NO: 80) |
| substitution | MQEIKRINKIRRRLVKDSNTKKAGKTGPMKTLLVRVMTPDLRERLENLRKKP |
| of L249I and | ENIPQPISNTSRANLNKLLTDYTEMKKAILHVYWEEFQKDPVGLMSRVAQPA |
| a substitution | PKNIDQRKLIPVKDGNERLTSSGFACSQCCQPLYVYKLEQVNDKGKPHTNYF |
| of M771N of | GRCNVSEHERLILLSPHKPEANDELVTYSLGKFGQRALDFYSIHVTRESNHP |
| SEQ ID | VKPLEQIGGNSCASGPVGKALSDACMGAVASFLTKYQDIIIEHQKVIKKNEK |
| NO: 2. | RLANLKDIASANGLAFPKITLPPQPHTKEGIEAYNNVVAQIVIWVNLNLWQK |
| | LKIGRDEAKPLQRLKGFPSFPLVERQANEVDWWDMVCNVKKLINEKKEDGKV |
| | FWQNLAGYKRQEALLPYLSSEEDRKKGKKFARYQFGDLLLHLEKKHGEDWGK |
| | VYDEAWERIDKKVEGLSKHIKLEEERRSEDAQSKAALTDWLRAKASFVIEGL |
| | KEADKDEFCRCELKLQKWYGDLRGKPFAIEAENSILDISGFSKQYNCAFIWQ |
| | KDGVKKLNLYLIINYFKGGKLRFKKIKPEAFEANRFYTVINKKSGEIVPMEV |
| | NFNFDDPNLIILPLAFGKRQGREFIWNDLLSLETGSLKLANGRVIEKTLYNR |
| | RTRQDEPALFVALTFERREVLDSSNIKPMNLIGIDRGENIPAVIALTDPEGC |
| | PLSRFKDSLGNPTHILRIGESYKEKQRTIQAAKEVEQRRAGGYSRKYASKAK |
| | NLADDMVRNTARDLLYYAVTQDAMLIFENLSRGFGRQGKRTFNAERQYTRME |
| | DWLTAKLAYEGLPSKTYLSKTLAQYTSKTCSNCGFTITSADYDRVLEKLKKT |
| | ATGWMTTINGKELKVEGQITYYNRYKRQNVVKDLSVELDRLSEESVNNDISS |
| | WTKGRSGEALSLLKKRFSHRPVQEKFVCLNCGFETHADEQAALNIARSWLFL |
| | RSQEYKKYQTNKTTGNTDKRAFVETWQSFYRKKLKEVWKPAV (SEQ ID |
| | NO: 81) |
| substitution | MQEIKRINKIRRRLVKDSNTKKAGKTGPMKTLLVRVMTPDLRERLENLRKKP |
| of V747K of | ENIPQPISNTSRANLNKLLTDYTEMKKAILHVYWEEFQKDPVGLMSRVAQPA |
| SEQ ID | PKNIDQRKLIPVKDGNERLTSSGFACSQCCQPLYVYKLEQVNDKGKPHTNYF |
| NO: 2. | GRCNVSEHERLILLSPHKPEANDELVTYSLGKFGQRALDFYSIHVTRESNHP |
| | VKPLEQIGGNSCASGPVGKALSDACMGAVASFLTKYQDIIIEHQKVIKKNEK |
| | RLANLKDIASANGLAFPKITLPPQPHTKEGIEAYNNVVAQIVIWVNLNLWQK |
| | LKIGRDEAKPLQRLKGFPSFPLVERQANEVDWWDMVCNVKKLINEKKEDGKV |
| | FWQNLAGYKRQEALLPYLSSEEDRKKGKKFARYQFGDLLLHLEKKHGEDWGK |
| | VYDEAWERIDKKVEGLSKHIKLEEERRSEDAQSKAALTDWLRAKASFVIEGL |
| | KEADKDEFCRCELKLQKWYGDLRGKPFAIEAENSILDISGFSKQYNCAFIWQ |
| | KDGVKKLNLYLIINYFKGGKLRFKKIKPEAFEANRFYTVINKKSGEIVPMEV |
| | NFNFDDPNLIILPLAFGKRQGREFIWNDLLSLETGSLKLANGRVIEKTLYNR |
| | RTRQDEPALFVALTFERREVLDSSNIKPMNLIGIDRGENIPAVIALTDPEGC |
| | PLSRFKDSLGNPTHILRIGESYKEKQRTIQAAKEVEQRRAGGYSRKYASKAK |
| | NLADDMVRNTARDLLYYAKTQDAMLIFENLSRGFGRQGKRTFMAERQYTRME |
| | DWLTAKLAYEGLPSKTYLSKTLAQYTSKTCSNCGFTITSADYDRVLEKLKKT |
| | ATGWMTTINGKELKVEGQITYYNRYKRQNVVKDLSVELDRLSEESVNNDISS |
| | WTKGRSGEALSLLKKRFSHRPVQEKFVCLNCGFETHADEQAALNIARSWLFL |
| | RSQEYKKYQTNKTTGNTDKRAFVETWQSFYRKKLKEVWKPAV (SEQ ID |
| | NO: 82) |
| substitution | MQEIKRINKIRRRLVKDSNTKKAGKTGPMKTLLVRVMTPDLRERLENLRKKP |
| of L379R, a | ENIPQPISNTSRANLNKLLTDYTEMKKAILHVYWEEFQKDPVGLMSRVAQPA |
| substitution | PKNIDQRKLIPVKDGNERLTSSGFACSQCCQPLYVYKLEQVNDKGKPHTNYF |
| of C477K, a | GRCNVSEHERLILLSPHKPEANDELVTYSLGKFGQRALDFYSIHVTRESNHP |
| substitution | VKPLEQIGGNSCASGPVGKALSDACMGAVASFLTKYQDIIIEHQKVIKKNEK |
| of A708K, a | RLANLKDIASANGLAFPKITLPPQPHTKEGIEAYNNVVAQIVIWVNLNLWQK |
| deletion of P | LKIGRDEAKPLQRLKGFPSFPLVERQANEVDWWDMVCNVKKLINEKKEDGKV |
| at position | FWQNLAGYKRQEALRPYLSSEEDRKKGKKFARYQFGDLLLHLEKKHGEDWGK |
| 793 and a | VYDEAWERIDKKVEGLSKHIKLEEERRSEDAQSKAALTDWLRAKASFVIEGL |
| substitution | KEADKDEFKRCELKLQKWYGDLRGKPFAIEAENSILDISGFSKQYNCAFIWQ |
| of M779N of | KDGVKKLNLYLIINYFKGGKLRFKKIKPEAFEANRFYTVINKKSGEIVPMEV |
| SEQ ID | NFNFDDPNLIILPLAFGKRQGREFIWNDLLSLETGSLKLANGRVIEKTLYNR |
| NO: 2. | RTRQDEPALFVALTFERREVLDSSNIKPMNLIGIDRGENIPAVIALTDPEGC |
| | PLSRFKDSLGNPTHILRIGESYKEKQRTIQAKKEVEQRRAGGYSRKYASKAK |
| | NLADDMVRNTARDLLYYAVTQDAMLIFENLSRGFGRQGKRTFMAERQYTRNE |
| | DWLTAKLAYEGLSKTYLSKTLAQYTSKTCSNCGFTITSADYDRVLEKLKKTA |
| | TGWMTTINGKELKVEGQITYYNRYKRQNVVKDLSVELDRLSEESVNNDISSW |
| | TKGRSGEALSLLKKRFSHRPVQEKFVCLNCGFETHADEQAALNIARSWLFLR |
| | SQEYKKYQTNKTTGNTDKRAFVETWQSFYRKKLKEVWKPAV (SEQ ID |
| | NO: 83) |
| L379R, | MQEIKRINKIRRRLVKDSNTKKAGKTGPMKTLLVRVMTPDLRERLENLRKKP |
| F755M | ENIPQPISNTSRANLNKLLTDYTEMKKAILHVYWEEFQKDPVGLMSRVAQPA |
| | PKNIDQRKLIPVKDGNERLTSSGFACSQCCQPLYVYKLEQVNDKGKPHTNYF |
| | GRCNVSEHERLILLSPHKPEANDELVTYSLGKFGQRALDFYSIHVTRESNHP |
| | VKPLEQIGGNSCASGPVGKALSDACMGAVASFLTKYQDIIIEHQKVIKKNEK |
| | RLANLKDIASANGLAFPKITLPPQPHTKEGIEAYNNVVAQIVIWVNLNLWQK |
| | LKIGRDEAKPLQRLKGFPSFPLVERQANEVDWWDMVCNVKKLINEKKEDGKV |
| | FWQNLAGYKRQEALLPYLSSEEDRKKGKKFARYQFGDLLLHLEKKHGEDWGK |
| | VYDEAWERIDKKVEGLSKHIKLEEERRSEDAQSKAALTDWLRAKASFVIEGL |
| | KEADKDEFCRCELKLQKWYGDLRGKPFAIEAENSILDISGFSKQYNCAFIWQ |
| | KDGVKKLNLYLIINYFKGGKLRFKKIKPEAFEANRFYTVINKKSGEIVPMEV |
| | NFNFDDPNLIILPLAFGKRQGREFIWNDLLSLETGSLKLANGRVIEKTLYNR |
| | RTRQDEPALFVALTFERREVLDSSNIKPMNLIGIDRGENIPAVIALTDPEGC |
| | PLSRFKDSLGNPTHILRIGESYKEKQRTIQAAKEVEQRRAGGYSRKYASKAK |
| | NLADDMVRNTARDLLYYAVTQDAMLIMENLSRGFGRQGKRTFMAERQYTRME |
| | DWLTAKLAYEGLPSKTYLSKTLAQYTSKTCSNCGFTITSADYDRVLEKLKKT |
| | ATGWMTTINGKELKVEGQITYYNRYKRQNVVKDLSVELDRLSEESVNNDISS |
| | WTKGRSGEALSLLKKRFSHRPVQEKFVCLNCGFETHADEQAALNIARSWLFL |
| | RSQEYKKYQTNKTTGNTDKRAFVETWQSFYRKKLKEVWKPAV (SEQ ID |
| | NO: 84) |
| 429: | MQEIKRINKIRRRLVKDSNTKKAGKTGPMKTLLVRVMTPDLRERLENLRKKP |
| L379R, | ENIPQPISNTSRANLNKLLTDYTEMKKAILHVYWEEFQKDPVGLMSRVAQPA |
| A708K, | PKNIDQRKLIPVKDGNERLTSSGFACSQCCQPLYVYKLEQVNDKGKPHTNYF |
| P793_, | GRCNVSEHERLILLSPHKPEANDELVTYSLGKFGQRALDFYSIHVTRESNHP |
| Y857R | VKPLEQIGGNSCASGPVGKALSDACMGAVASFLTKYQDIIIEHQKVIKKNEK |
| | RLANLKDIASANGLAFPKITLPPQPHTKEGIEAYNNVVAQIVIWVNLNLWQK |
| | LKIGRDEAKPLQRLKGFPSFPLVERQANEVDWWDMVCNVKKLINEKKEDGKV |
| | FWQNLAGYKRQEALRPYLSSEEDRKKGKKFARYQFGDLLLHLEKKHGEDWGK |
| | VYDEAWERIDKKVEGLSKHIKLEEERRSEDAQSKAALTDWLRAKASFVIEGL |
| | KEADKDEFCRCELKLQKWYGDLRGKPFAIEAENSILDISGFSKQYNCAFIWQ |
| | KDGVKKLNLYLIINYFKGGKLRFKKIKPEAFEANRFYTVINKKSGEIVPMEV |
| | NFNFDDPNLIILPLAFGKRQGREFIWNDLLSLETGSLKLANGRVIEKTLYNR |
| | RTRQDEPALFVALTFERREVLDSSNIKPMNLIGIDRGENIPAVIALTDPEGC |
| | PLSRFKDSLGNPTHILRIGESYKEKQRTIQAKKEVEQRRAGGYSRKYASKAK |
| | NLADDMVRNTARDLLYYAVTQDAMLIFENLSRGFGRQGKRTFMAERQYTRME |
| | DWLTAKLAYEGLSKTYLSKTLAQYTSKTCSNCGFTITSADYDRVLEKLKKTA |
| | TGWMTTINGKELKVEGQITYYNRRKRQNVVKDLSVELDRLSEESVNNDISSW |
| | TKGRSGEALSLLKKRFSHRPVQEKFVCLNCGFETHADEQAALNIARSWLFLR |
| | SQEYKKYQTNKTTGNTDKRAFVETWQSFYRKKLKEVWKPAV (SEQ ID |
| | NO: 85) |
| 430: | MQEIKRINKIRRRLVKDSNTKKAGKTGPMKTLLVRVMTPDLRERLENLRKKP |
| L379R, | ENIPQPISNTSRANLNKLLTDYTEMKKAILHVYWEEFQKDPVGLMSRVAQPA |
| A708K, | PKNIDQRKLIPVKDGNERLTSSGFACSQCCQPLYVYKLEQVNDKGKPHTNYF |
| P793_, | GRCNVSEHERLILLSPHKPEANDELVTYSLGKFGQRALDFYSIHVTRESNHP |
| Y857R, | VKPLEQIGGNSCASGPVGKALSDACMGAVASFLTKYQDIIIEHQKVIKKNEK |
| 1658V | RLANLKDIASANGLAFPKITLPPQPHTKEGIEAYNNVVAQIVIWVNLNLWQK |
| | LKIGRDEAKPLQRLKGFPSFPLVERQANEVDWWDMVCNVKKLINEKKEDGKV |
| | FWQNLAGYKRQEALRPYLSSEEDRKKGKKFARYQFGDLLLHLEKKHGEDWGK |
| | VYDEAWERIDKKVEGLSKHIKLEEERRSEDAQSKAALTDWLRAKASFVIEGL |
| | KEADKDEFCRCELKLQKWYGDLRGKPFAIEAENSILDISGFSKQYNCAFIWQ |
| | KDGVKKLNLYLIINYFKGGKLRFKKIKPEAFEANRFYTVINKKSGEIVPMEV |
| | NFNFDDPNLIILPLAFGKRQGREFIWNDLLSLETGSLKLANGRVIEKTLYNR |
| | RTRQDEPALFVALTFERREVLDSSNIKPMNLIGVDRGENIPAVIALTDPEGC |
| | PLSRFKDSLGNPTHILRIGESYKEKQRTIQAKKEVEQRRAGGYSRKYASKAK |
| | NLADDMVRNTARDLLYYAVTQDAMLIFENLSRGFGRQGKRTFMAERQYTRME |
| | DWLTAKLAYEGLSKTYLSKTLAQYTSKTCSNCGFTITSADYDRVLEKLKKTA |
| | TGWMTTINGKELKVEGQITYYNRRKRQNVVKDLSVELDRLSEESVNNDISSW |
| | TKGRSGEALSLLKKRFSHRPVQEKFVCLNCGFETHADEQAALNIARSWLFLR |
| | SQEYKKYQTNKTTGNTDKRAFVETWQSFYRKKLKEVWKPAV (SEQ ID |
| | NO: 86) |
| 431: | MQEIKRINKIRRRLVKDSNTKKAGKTGPMKTLLVRVMTPDLRERLENLRKKP |
| L379R, | ENIPQPISNTSRANLNKLLTDYTEMKKAILHVYWEEFQKDPVGLMSRVAQPA |
| A708K, | PKNIDQRKLIPVKDGNERLTSSGFACSQCCQPLYVYKLEQVNDKGKPHTNYF |
| P793_, | GRCNVSEHERLILLSPHKPEANDELVTYSLGKFGQRALDFYSIHVTRESNHP |
| Y857R, | VKPLEQIGGNSCASGPVGKALSDACMGAVASFLTKYQDIIIEHQKVIKKNEK |
| 1658V, | RLANLKDIASANGLAFPKITLPPQPHTKEGIEAYNNVVAQIVIWVNLNLWQK |
| E386N | LKIGRDEAKPLQRLKGFPSFPLVERQANEVDWWDMVCNVKKLINEKKEDGKV |
| | FWQNLAGYKRQEALRPYLSSENDRKKGKKFARYQFGDLLLHLEKKHGEDWGK |
| | VYDEAWERIDKKVEGLSKHIKLEEERRSEDAQSKAALTDWLRAKASFVIEGL |
| | KEADKDEFCRCELKLQKWYGDLRGKPFAIEAENSILDISGFSKQYNCAFIWQ |
| | KDGVKKLNLYLIINYFKGGKLRFKKIKPEAFEANRFYTVINKKSGEIVPMEV |
| | NFNFDDPNLIILPLAFGKRQGREFIWNDLLSLETGSLKLANGRVIEKTLYNR |
| | RTRQDEPALFVALTFERREVLDSSNIKPMNLIGVDRGENIPAVIALTDPEGC |
| | PLSRFKDSLGNPTHILRIGESYKEKQRTIQAKKEVEQRRAGGYSRKYASKAK |
| | NLADDMVRNTARDLLYYAVTQDAMLIFENLSRGFGRQGKRTFMAERQYTRME |
| | DWLTAKLAYEGLSKTYLSKTLAQYTSKTCSNCGFTITSADYDRVLEKLKKTA |
| | TGWMTTINGKELKVEGQITYYNRRKRQNVVKDLSVELDRLSEESVNNDISSW |
| | TKGRSGEALSLLKKRFSHRPVQEKFVCLNCGFETHADEQAALNIARSWLFLR |
| | SQEYKKYQTNKTTGNTDKRAFVETWQSFYRKKLKEVWKPAV (SEQ ID |
| | NO: 87) |
| 432: | MQEIKRINKIRRRLVKDSNTKKAGKTGPMKTLLVRVMTPDLRERLENLRKKP |
| L379R, | ENIPQPISNTSRANLNKLLTDYTEMKKAILHVYWEEFQKDPVGLMSRVAQPA |
| A708K, | PKNIDQRKLIPVKDGNERLTSSGFACSQCCQPLYVYKLEQVNDKGKPHTNYF |
| P793_, | GRCNVSEHERLILLSPHKPEANDELVTYSLGKFGQRALDFYSIHVTRESNHP |
| Y857R, | VKPLEQIGGNSCASGPVGKALSDACMGAVASFLTKYQDIIIEHQKVIKKNEK |
| 1658V, | RLANLKDIASANGLAFPKITLPPQPHTKEGIEAYNNVVAQIVIWVNLNLWQK |
| L404K | LKIGRDEAKPLQRLKGFPSFPLVERQANEVDWWDMVCNVKKLINEKKEDGKV |
| | FWQNLAGYKRQEALRPYLSSEEDRKKGKKFARYQFGDLLKHLEKKHGEDWGK |
| | VYDEAWERIDKKVEGLSKHIKLEEERRSEDAQSKAALTDWLRAKASFVIEGL |
| | KEADKDEFCRCELKLQKWYGDLRGKPFAIEAENSILDISGFSKQYNCAFIWQ |
| | KDGVKKLNLYLIINYFKGGKLRFKKIKPEAFEANRFYTVINKKSGEIVPMEV |
| | NFNFDDPNLIILPLAFGKRQGREFIWNDLLSLETGSLKLANGRVIEKTLYNR |
| | RTRQDEPALFVALTFERREVLDSSNIKPMNLIGVDRGENIPAVIALTDPEGC |
| | PLSRFKDSLGNPTHILRIGESYKEKQRTIQAKKEVEQRRAGGYSRKYASKAK |
| | NLADDMVRNTARDLLYYAVTQDAMLIFENLSRGFGRQGKRTFMAERQYTRME |
| | DWLTAKLAYEGLSKTYLSKTLAQYTSKTCSNCGFTITSADYDRVLEKLKKTA |
| | TGWMTTINGKELKVEGQITYYNRRKRQNVVKDLSVELDRLSEESVNNDISSW |
| | TKGRSGEALSLLKKRFSHRPVQEKFVCLNCGFETHADEQAALNIARSWLFLR |
| | SQEYKKYQTNKTTGNTDKRAFVETWQSFYRKKLKEVWKPAV (SEQ ID |
| | NO: 88) |
| 433: | MQEIKRINKIRRRLVKDSNTKKAGKTGPMKTLLVRVMTPDLRERLENLRKKP |
| L379R, | ENIPQPISNTSRANLNKLLTDYTEMKKAILHVYWEEFQKDPVGLMSRVAQPA |
| A708K, | PKNIDQRKLIPVKDGNERLTSSGFACSQCCQPLYVYKLEQVNDKGKPHTNYF |
| P793_, | GRCNVSEHERLILLSPHKPEANDELVTYSLGKFGQVRALDFYSIHVTRESNH |
| Y857R, | PVKPLEQIGGNSCASGPVGKALSDACMGAVASFLTKYQDIIIEHQKVIKKNE |
| 1658V, | KRLANLKDIASANGLAFPKITLPPQPHTKEGIEAYNNVVAQIVIWVNLNLWQ |
| AV192 | KLKIGRDEAKPLQRLKGFPSFPLVERQANEVDWWDMVCNVKKLINEKKEDGK |
| | VFWQNLAGYKRQEALRPYLSSEEDRKKGKKFARYQFGDLLLHLEKKHGEDWG |
| | KVYDEAWERIDKKVEGLSKHIKLEEERRSEDAQSKAALTDWLRAKASFVIEG |
| | LKEADKDEFCRCELKLQKWYGDLRGKPFAIEAENSILDISGFSKQYNCAFIW |
| | QKDGVKKLNLYLIINYFKGGKLRFKKIKPEAFEANRFYTVINKKSGEIVPME |
| | VNFNFDDPNLIILPLAFGKRQGREFIWNDLLSLETGSLKLANGRVIEKTLYN |
| | RRTRQDEPALFVALTFERREVLDSSNIKPMNLIGVDRGENIPAVIALTDPEG |
| | CPLSRFKDSLGNPTHILRIGESYKEKQRTIQAKKEVEQRRAGGYSRKYASKA |
| | KNLADDMVRNTARDLLYYAVTQDAMLIFENLSRGFGRQGKRTFMAERQYTRM |
| | EDWLTAKLAYEGLSKTYLSKTLAQYTSKTCSNCGFTITSADYDRVLEKLKKT |
| | ATGWMTTINGKELKVEGQITYYNRRKRQNVVKDLSVELDRLSEESVNNDISS |
| | WTKGRSGEALSLLKKRFSHRPVQEKFVCLNCGFETHADEQAALNIARSWLFL |
| | RSQEYKKYQTNKTTGNTDKRAFVETWQSFYRKKLKEVWKPAV (SEQ ID |
| | NO: 89) |
| 434: | MQEIKRINKIRRRLVKDSNTKKAGKTGPMKTLLVRVMTPDLRERLENLRKKP |
| L379R, | ENIPQPISNTSRANLNKLLTDYTEMKKAILHVYWEEFQKDPVGLMSRVAQPA |
| A708K, | PKNIDQRKLIPVKDGNERLTSSGFACSQCCQPLYVYKLEQVNDKGKPHTNYF |
| P793_, | GRCNVSEHERLILLSPHKPEANDELVTYSLGKFGQRALDFYSIHVTRESNHP |
| Y857R, | VKPLEQIGGNSCASGPVGKALSDACMGAVASFLTKYQDIIIEHQKVIKKNEK |
| 1658V, | RLANLKDIASANGLAFPKITLPPQPHTKEGIEAYNNVVAQIVIWVNLNLWQK |
| L404K, | LKIGRDEAKPLQRLKGFPSFPLVERQANEVDWWDMVCNVKKLINEKKEDGKV |
| E386N | FWQNLAGYKRQEALRPYLSSENDRKKGKKFARYQFGDLLKHLEKKHGEDWGK |
| | VYDEAWERIDKKVEGLSKHIKLEEERRSEDAQSKAALTDWLRAKASFVIEGL |
| | KEADKDEFCRCELKLQKWYGDLRGKPFAIEAENSILDISGFSKQYNCAFIWQ |
| | KDGVKKLNLYLIINYFKGGKLRFKKIKPEAFEANRFYTVINKKSGEIVPMEV |
| | NFNFDDPNLIILPLAFGKRQGREFIWNDLLSLETGSLKLANGRVIEKTLYNR |
| | RTRQDEPALFVALTFERREVLDSSNIKPMNLIGVDRGENIPAVIALTDPEGC |
| | PLSRFKDSLGNPTHILRIGESYKEKQRTIQAKKEVEQRRAGGYSRKYASKAK |
| | NLADDMVRNTARDLLYYAVTQDAMLIFENLSRGFGRQGKRTFMAERQYTRME |
| | DWLTAKLAYEGLSKTYLSKTLAQYTSKTCSNCGFTITSADYDRVLEKLKKTA |
| | TGWMTTINGKELKVEGQITYYNRRKRQNVVKDLSVELDRLSEESVNNDISSW |
| | TKGRSGEALSLLKKRFSHRPVQEKFVCLNCGFETHADEQAALNIARSWLFLR |
| | SQEYKKYQTNKTTGNTDKRAFVETWQSFYRKKLKEVWKPAV (SEQ ID |
| | NO: 90) |
| 435: | MQEIKRINKIRRRLVKDSNTKKAGKTGPMKTLLVRVMTPDLRERLENLRKKP |
| L379R, | ENIPQPISNTSRANLNKLLTDYTEMKKAILHVYWEEFQKDPVGLMSRVAQPA |
| A708K, | PKNIDQRKLIPVKDGNERLTSSGFACSQCCQPLYVYKLEQVNDKGKPHTNYF |
| P793_, | GRCNVSEHERLILLSPHKPEANDELVTYSLGKFGQRALDFYSIHVTRESNHP |
| Y857R, | VKPLEQIGGNSCASGPVGKALSDACMGAVASFLTKYQDIIIEHQKVIKKNEK |
| 1658V, | RLANLKDIASANGLAFPKITLPPQPHTKEGIEAYNNVVAQIVIWVNLNLWQK |
| F399L | LKIGRDEAKPLQRLKGFPSFPLVERQANEVDWWDMVCNVKKLINEKKEDGKV |
| | FWQNLAGYKRQEALRPYLSSEEDRKKGKKFARYQLGDLLLHLEKKHGEDWGK |
| | VYDEAWERIDKKVEGLSKHIKLEEERRSEDAQSKAALTDWLRAKASFVIEGL |
| | KEADKDEFCRCELKLQKWYGDLRGKPFAIEAENSILDISGFSKQYNCAFIWQ |
| | KDGVKKLNLYLIINYFKGGKLRFKKIKPEAFEANRFYTVINKKSGEIVPMEV |
| | NFNFDDPNLIILPLAFGKRQGREFIWNDLLSLETGSLKLANGRVIEKTLYNR |
| | RTRQDEPALFVALTFERREVLDSSNIKPMNLIGVDRGENIPAVIALTDPEGC |
| | PLSRFKDSLGNPTHILRIGESYKEKQRTIQAKKEVEQRRAGGYSRKYASKAK |
| | NLADDMVRNTARDLLYYAVTQDAMLIFENLSRGFGRQGKRTFMAERQYTRME |
| | DWLTAKLAYEGLSKTYLSKTLAQYTSKTCSNCGFTITSADYDRVLEKLKKTA |
| | TGWMTTINGKELKVEGQITYYNRRKRQNVVKDLSVELDRLSEESVNNDISSW |
| | TKGRSGEALSLLKKRFSHRPVQEKFVCLNCGFETHADEQAALNIARSWLFLR |
| | SQEYKKYQTNKTTGNTDKRAFVETWQSFYRKKLKEVWKPAV (SEQ ID |
| | NO: 91) |
| 436: | MQEIKRINKIRRRLVKDSNTKKAGKTGPMKTLLVRVMTPDLRERLENLRKKP |
| L379R, | ENIPQPISNTSRANLNKLLTDYTEMKKAILHVYWEEFQKDPVGLMSRVAQPA |
| A708K, | PKNIDQRKLIPVKDGNERLTSSGFACSQCCQPLYVYKLEQVNDKGKPHTNYF |
| P793_, | GRCNVSEHERLILLSPHKPEANDELVTYSLGKFGQRALDFYSIHVTRESNHP |
| Y857R, | VKPLEQIGGNSCASGPVGKALSDACMGAVASFLTKYQDIIIEHQKVIKKNEK |
| 1658V, | RLANLKDIASANGLAFPKITLPPQPHTKEGIEAYNNVVAQIVIWVNLNLWQK |
| F399L, | LKIGRDEAKPLQRLKGFPSFPLVERQANEVDWWDMVCNVKKLINEKKEDGKV |
| E386N | FWQNLAGYKRQEALRPYLSSENDRKKGKKFARYQLGDLLLHLEKKHGEDWGK |
| | VYDEAWERIDKKVEGLSKHIKLEEERRSEDAQSKAALTDWLRAKASFVIEGL |
| | KEADKDEFCRCELKLQKWYGDLRGKPFAIEAENSILDISGFSKQYNCAFIWQ |
| | KDGVKKLNLYLIINYFKGGKLRFKKIKPEAFEANRFYTVINKKSGEIVPMEV |
| | NFNFDDPNLIILPLAFGKRQGREFIWNDLLSLETGSLKLANGRVIEKTLYNR |
| | RTRQDEPALFVALTFERREVLDSSNIKPMNLIGVDRGENIPAVIALTDPEGC |
| | PLSRFKDSLGNPTHILRIGESYKEKQRTIQAKKEVEQRRAGGYSRKYASKAK |
| | NLADDMVRNTARDLLYYAVTQDAMLIFENLSRGFGRQGKRTFMAERQYTRME |
| | DWLTAKLAYEGLSKTYLSKTLAQYTSKTCSNCGFTITSADYDRVLEKLKKTA |
| | TGWMTTINGKELKVEGQITYYNRRKRQNVVKDLSVELDRLSEESVNNDISSW |
| | TKGRSGEALSLLKKRFSHRPVQEKFVCLNCGFETHADEQAALNIARSWLFLR |
| | SQEYKKYQTNKTTGNTDKRAFVETWQSFYRKKLKEVWKPAV (SEQ ID |
| | NO: 92) |
| 437: | MQEIKRINKIRRRLVKDSNTKKAGKTGPMKTLLVRVMTPDLRERLENLRKKP |
| L379R, | ENIPQPISNTSRANLNKLLTDYTEMKKAILHVYWEEFQKDPVGLMSRVAQPA |
| A708K, | PKNIDQRKLIPVKDGNERLTSSGFACSQCCQPLYVYKLEQVNDKGKPHTNYF |
| P793_, | GRCNVSEHERLILLSPHKPEANDELVTYSLGKFGQRALDFYSIHVTRESNHP |
| Y857R, | VKPLEQIGGNSCASGPVGKALSDACMGAVASFLTKYQDIIIEHQKVIKKNEK |
| 1658V, | RLANLKDIASANGLAFPKITLPPQPHTKEGIEAYNNVVAQIVIWVNLNLWQK |
| F399L, | LKIGRDEAKPLQRLKGFPSFPLVERQANEVDWWDMVCNVKKLINEKKEDGKV |
| C477S | FWQNLAGYKRQEALRPYLSSEEDRKKGKKFARYQLGDLLLHLEKKHGEDWGK |
| | VYDEAWERIDKKVEGLSKHIKLEEERRSEDAQSKAALTDWLRAKASFVIEGL |
| | KEADKDEFSRCELKLQKWYGDLRGKPFAIEAENSILDISGFSKQYNCAFIWQ |
| | KDGVKKLNLYLIINYFKGGKLRFKKIKPEAFEANRFYTVINKKSGEIVPMEV |
| | NFNFDDPNLIILPLAFGKRQGREFIWNDLLSLETGSLKLANGRVIEKTLYNR |
| | RTRQDEPALFVALTFERREVLDSSNIKPMNLIGVDRGENIPAVIALTDPEGC |
| | PLSRFKDSLGNPTHILRIGESYKEKQRTIQAKKEVEQRRAGGYSRKYASKAK |
| | NLADDMVRNTARDLLYYAVTQDAMLIFENLSRGFGRQGKRTFMAERQYTRME |
| | DWLTAKLAYEGLSKTYLSKTLAQYTSKTCSNCGFTITSADYDRVLEKLKKTA |
| | TGWMTTINGKELKVEGQITYYNRRKRQNVVKDLSVELDRLSEESVNNDISSW |
| | TKGRSGEALSLLKKRFSHRPVQEKFVCLNCGFETHADEQAALNIARSWLFLR |
| | SQEYKKYQTNKTTGNTDKRAFVETWQSFYRKKLKEVWKPAV (SEQ ID |
| | NO: 93) |
| 438: | MQEIKRINKIRRRLVKDSNTKKAGKTGPMKTLLVRVMTPDLRERLENLRKKP |
| L379R, | ENIPQPISNTSRANLNKLLTDYTEMKKAILHVYWEEFQKDPVGLMSRVAQPA |
| A708K, | PKNIDQRKLIPVKDGNERLTSSGFACSQCCQPLYVYKLEQVNDKGKPHTNYF |
| P793_, | GRCNVSEHERLILLSPHKPEANDELVTYSLGKFGQRALDFYSIHVTRESNHP |
| Y857R, | VKPLEQIGGNSCASGPVGKALSDACMGAVASFLTKYQDIIIEHQKVIKKNEK |
| 1658V, | RLANLKDIASANGLAFPKITLPPQPHTKEGIEAYNNVVAQIVIWVNLNLWQK |
| F399L, | LKIGRDEAKPLQRLKGFPSFPLVERQANEVDWWDMVCNVKKLINEKKEDGKV |
| L404K | FWQNLAGYKRQEALRPYLSSEEDRKKGKKFARYQLGDLLKHLEKKHGEDWGK |
| | VYDEAWERIDKKVEGLSKHIKLEEERRSEDAQSKAALTDWLRAKASFVIEGL |
| | KEADKDEFCRCELKLQKWYGDLRGKPFAIEAENSILDISGFSKQYNCAFIWQ |
| | KDGVKKLNLYLIINYFKGGKLRFKKIKPEAFEANRFYTVINKKSGEIVPMEV |
| | NFNFDDPNLIILPLAFGKRQGREFIWNDLLSLETGSLKLANGRVIEKTLYNR |
| | RTRQDEPALFVALTFERREVLDSSNIKPMNLIGVDRGENIPAVIALTDPEGC |
| | PLSRFKDSLGNPTHILRIGESYKEKQRTIQAKKEVEQRRAGGYSRKYASKAK |
| | NLADDMVRNTARDLLYYAVTQDAMLIFENLSRGFGRQGKRTFMAERQYTRME |
| | DWLTAKLAYEGLSKTYLSKTLAQYTSKTCSNCGFTITSADYDRVLEKLKKTA |
| | TGWMTTINGKELKVEGQITYYNRRKRQNVVKDLSVELDRLSEESVNNDISSW |
| | TKGRSGEALSLLKKRFSHRPVQEKFVCLNCGFETHADEQAALNIARSWLFLR |
| | SQEYKKYQTNKTTGNTDKRAFVETWQSFYRKKLKEVWKPAV (SEQ ID |
| | NO: 94) |
| 439: | MQEIKRINKIRRRLVKDSNTKKAGKTGPMKTLLVRVMTPDLRERLENLRKKP |
| L379R, | ENIPQPISNTSRANLNKLLTDYTEMKKAILHVYWEEFQKDPVGLMSRVAQPA |
| A708K, | PKNIDQRKLIPVKDGNERLTSSGFACSQCCQPLYVYKLEQVNDKGKPHTNYF |
| P793_, | GRCNVSEHERLILLSPHKPEANDELVTYSLGKFGQRALDFYSIHVTRESNHP |
| Y857R, | VKPLEQIGGNSCASGPVGKALSDACMGAVASFLTKYQDIIIEHQKVIKKNEK |
| 1658V, | RLANLKDIASANGLAFPKITLPPQPHTKEGIEAYNNVVAQIVIWVNLNLWQK |
| F399L, | LKIGRDEAKPLQRLKGFPSFPLVERQANEVDWWDMVCNVKKLINEKKEDGKV |
| E386N, | FWQNLAGYKRQEALRPYLSSENDRKKGKKFARYQLGDLLKHLEKKHGEDWGK |
| C477S, | VYDEAWERIDKKVEGLSKHIKLEEERRSEDAQSKAALTDWLRAKASFVIEGL |
| L404K | KEADKDEFSRCELKLQKWYGDLRGKPFAIEAENSILDISGFSKQYNCAFIWQ |
| | KDGVKKLNLYLIINYFKGGKLRFKKIKPEAFEANRFYTVINKKSGEIVPMEV |
| | NFNFDDPNLIILPLAFGKRQGREFIWNDLLSLETGSLKLANGRVIEKTLYNR |
| | RTRQDEPALFVALTFERREVLDSSNIKPMNLIGVDRGENIPAVIALTDPEGC |
| | PLSRFKDSLGNPTHILRIGESYKEKQRTIQAKKEVEQRRAGGYSRKYASKAK |
| | NLADDMVRNTARDLLYYAVTQDAMLIFENLSRGFGRQGKRTFMAERQYTRME |
| | DWLTAKLAYEGLSKTYLSKTLAQYTSKTCSNCGFTITSADYDRVLEKLKKTA |
| | TGWMTTINGKELKVEGQITYYNRRKRQNVVKDLSVELDRLSEESVNNDISSW |
| | TKGRSGEALSLLKKRFSHRPVQEKFVCLNCGFETHADEQAALNIARSWLFLR |
| | SQEYKKYQTNKTTGNTDKRAFVETWQSFYRKKLKEVWKPAV (SEQ ID |
| | NO: 95) |
| 440: | MQEIKRINKIRRRLVKDSNTKKAGKTGPMKTLLVRVMTPDLRERLENLRKKP |
| L379R, | ENIPQPISNTSRANLNKLLTDYTEMKKAILHVYWEEFQKDPVGLMSRVAQPA |
| A708K, | PKNIDQRKLIPVKDGNERLTSSGFACSQCCQPLYVYKLEQVNDKGKPHTNYF |
| P793_, | GRCNVSEHERLILLSPHKPEANDELVTYSLGKFGQRALDFYSIHVTRESNHP |
| Y857R, | VKPLEQIGGNSCASGPVGKALSDACMGAVASFLTKYQDIIIEHQKVIKKNEK |
| 1658V, | RLANLKDIASANGLAFPKITLPPQPHTKEGIEAYNNVVAQIVIWVNLNLWQK |
| F399L, | LKIGRDEAKPLQRLKGFPSFPLVERQANEVDWWDMVCNVKKLINEKKEDGKV |
| Y797L | FWQNLAGYKRQEALRPYLSSEEDRKKGKKFARYQLGDLLLHLEKKHGEDWGK |
| | VYDEAWERIDKKVEGLSKHIKLEEERRSEDAQSKAALTDWLRAKASFVIEGL |
| | KEADKDEFCRCELKLQKWYGDLRGKPFAIEAENSILDISGFSKQYNCAFIWQ |
| | KDGVKKLNLYLIINYFKGGKLRFKKIKPEAFEANRFYTVINKKSGEIVPMEV |
| | NFNFDDPNLIILPLAFGKRQGREFIWNDLLSLETGSLKLANGRVIEKTLYNR |
| | RTRQDEPALFVALTFERREVLDSSNIKPMNLIGVDRGENIPAVIALTDPEGC |
| | PLSRFKDSLGNPTHILRIGESYKEKQRTIQAKKEVEQRRAGGYSRKYASKAK |
| | NLADDMVRNTARDLLYYAVTQDAMLIFENLSRGFGRQGKRTFMAERQYTRME |
| | DWLTAKLAYEGLSKTLLSKTLAQYTSKTCSNCGFTITSADYDRVLEKLKKTA |
| | TGWMTTINGKELKVEGQITYYNRRKRQNVVKDLSVELDRLSEESVNNDISSW |
| | TKGRSGEALSLLKKRFSHRPVQEKFVCLNCGFETHADEQAALNIARSWLFLR |
| | SQEYKKYQTNKTTGNTDKRAFVETWQSFYRKKLKEVWKPAV (SEQ ID |
| | NO: 96) |
| 441: | MQEIKRINKIRRRLVKDSNTKKAGKTGPMKTLLVRVMTPDLRERLENLRKKP |
| L379R, | ENIPQPISNTSRANLNKLLTDYTEMKKAILHVYWEEFQKDPVGLMSRVAQPA |
| A708K, | PKNIDQRKLIPVKDGNERLTSSGFACSQCCQPLYVYKLEQVNDKGKPHTNYF |
| P793_, | GRCNVSEHERLILLSPHKPEANDELVTYSLGKFGQRALDFYSIHVTRESNHP |
| Y857R, | VKPLEQIGGNSCASGPVGKALSDACMGAVASFLTKYQDIIIEHQKVIKKNEK |
| 1658V, | RLANLKDIASANGLAFPKITLPPQPHTKEGIEAYNNVVAQIVIWVNLNLWQK |
| F399L, | LKIGRDEAKPLQRLKGFPSFPLVERQANEVDWWDMVCNVKKLINEKKEDGKV |
| Y797L, | FWQNLAGYKRQEALRPYLSSENDRKKGKKFARYQLGDLLLHLEKKHGEDWGK |
| E386N | VYDEAWERIDKKVEGLSKHIKLEEERRSEDAQSKAALTDWLRAKASFVIEGL |
| | KEADKDEFCRCELKLQKWYGDLRGKPFAIEAENSILDISGFSKQYNCAFIWQ |
| | KDGVKKLNLYLIINYFKGGKLRFKKIKPEAFEANRFYTVINKKSGEIVPMEV |
| | NFNFDDPNLIILPLAFGKRQGREFIWNDLLSLETGSLKLANGRVIEKTLYNR |
| | RTRQDEPALFVALTFERREVLDSSNIKPMNLIGVDRGENIPAVIALTDPEGC |
| | PLSRFKDSLGNPTHILRIGESYKEKQRTIQAKKEVEQRRAGGYSRKYASKAK |
| | NLADDMVRNTARDLLYYAVTQDAMLIFENLSRGFGRQGKRTFMAERQYTRME |
| | DWLTAKLAYEGLSKTLLSKTLAQYTSKTCSNCGFTITSADYDRVLEKLKKTA |
| | TGWMTTINGKELKVEGQITYYNRRKRQNVVKDLSVELDRLSEESVNNDISSW |
| | TKGRSGEALSLLKKRFSHRPVQEKFVCLNCGFETHADEQAALNIARSWLFLR |
| | SQEYKKYQTNKTTGNTDKRAFVETWQSFYRKKLKEVWKPAV (SEQ ID |
| | NO: 97) |
| 442: | MQEIKRINKIRRRLVKDSNTKKAGKTGPMKTLLVRVMTPDLRERLENLRKKP |
| L379R, | ENIPQPISNTSRANLNKLLTDYTEMKKAILHVYWEEFQKDPVGLMSRVAQPA |
| A708K, | PKNIDQRKLIPVKDGNERLTSSGFACSQCCQPLYVYKLEQVNDKGKPHTNYF |
| P793_, | GRCNVSEHERLILLSPHKPEANDELVTYSLGKFGQRALDFYSIHVTRESNHP |
| Y857R, | VKPLEQIGGNSCASGPVGKALSDACMGAVASFLTKYQDIIIEHQKVIKKNEK |
| 1658V, | RLANLKDIASANGLAFPKITLPPQPHTKEGIEAYNNVVAQIVIWVNLNLWQK |
| F399L, | LKIGRDEAKPLQRLKGFPSFPLVERQANEVDWWDMVCNVKKLINEKKEDGKV |
| Y797L, | FWQNLAGYKRQEALRPYLSSENDRKKGKKFARYQLGDLLKHLEKKHGEDWGK |
| E386N, | VYDEAWERIDKKVEGLSKHIKLEEERRSEDAQSKAALTDWLRAKASFVIEGL |
| C477S, | KEADKDEFSRCELKLQKWYGDLRGKPFAIEAENSILDISGFSKQYNCAFIWQ |
| L404K | KDGVKKLNLYLIINYFKGGKLRFKKIKPEAFEANRFYTVINKKSGEIVPMEV |
| | NFNFDDPNLIILPLAFGKRQGREFIWNDLLSLETGSLKLANGRVIEKTLYNR |
| | RTRQDEPALFVALTFERREVLDSSNIKPMNLIGVDRGENIPAVIALTDPEGC |
| | PLSRFKDSLGNPTHILRIGESYKEKQRTIQAKKEVEQRRAGGYSRKYASKAK |
| | NLADDMVRNTARDLLYYAVTQDAMLIFENLSRGFGRQGKRTFMAERQYTRME |
| | DWLTAKLAYEGLSKTLLSKTLAQYTSKTCSNCGFTITSADYDRVLEKLKKTA |
| | TGWMTTINGKELKVEGQITYYNRRKRQNVVKDLSVELDRLSEESVNNDISSW |
| | TKGRSGEALSLLKKRFSHRPVQEKFVCLNCGFETHADEQAALNIARSWLFLR |
| | SQEYKKYQTNKTTGNTDKRAFVETWQSFYRKKLKEVWKPAV (SEQ ID |
| | NO: 98) |
| 443: | MQEIKRINKIRRRLVKDSNTKKAGKTGPMKTLLVRVMTPDLRERLENLRKKP |
| L379R, | ENIPQPISNTSRANLNKLLTDYTEMKKAILHVYWEEFQKDPVGLMSRVAQPA |
| A708K, | PKNIDQRKLIPVKDGNERLTSSGFACSQCCQPLYVYKLEQVNDKGKPHTNYF |
| P793_, | GRCNVSEHERLILLSPHKPEANDELVTYSLGKFGQRALDFYSIHVTRESNHP |
| Y857R, | VKPLEQIGGNSCASGPVGKALSDACMGAVASFLTKYQDIIIEHQKVIKKNEK |
| 1658V, | RLANLKDIASANGLAFPKITLPPQPHTKEGIEAYNNVVAQIVIWVNLNLWQK |
| Y797L | LKIGRDEAKPLQRLKGFPSFPLVERQANEVDWWDMVCNVKKLINEKKEDGKV |
| | FWQNLAGYKRQEALRPYLSSEEDRKKGKKFARYQFGDLLLHLEKKHGEDWGK |
| | VYDEAWERIDKKVEGLSKHIKLEEERRSEDAQSKAALTDWLRAKASFVIEGL |
| | KEADKDEFCRCELKLQKWYGDLRGKPFAIEAENSILDISGFSKQYNCAFIWQ |
| | KDGVKKLNLYLIINYFKGGKLRFKKIKPEAFEANRFYTVINKKSGEIVPMEV |
| | NFNFDDPNLIILPLAFGKRQGREFIWNDLLSLETGSLKLANGRVIEKTLYNR |
| | RTRQDEPALFVALTFERREVLDSSNIKPMNLIGVDRGENIPAVIALTDPEGC |
| | PLSRFKDSLGNPTHILRIGESYKEKQRTIQAKKEVEQRRAGGYSRKYASKAK |
| | NLADDMVRNTARDLLYYAVTQDAMLIFENLSRGFGRQGKRTFMAERQYTRME |
| | DWLTAKLAYEGLSKTLLSKTLAQYTSKTCSNCGFTITSADYDRVLEKLKKTA |
| | TGWMTTINGKELKVEGQITYYNRRKRQNVVKDLSVELDRLSEESVNNDISSW |
| | TKGRSGEALSLLKKRFSHRPVQEKFVCLNCGFETHADEQAALNIARSWLFLR |
| | SQEYKKYQTNKTTGNTDKRAFVETWQSFYRKKLKEVWKPAV (SEQ ID |
| | NO: 99) |
| 444: | MQEIKRINKIRRRLVKDSNTKKAGKTGPMKTLLVRVMTPDLRERLENLRKKP |
| L379R, | ENIPQPISNTSRANLNKLLTDYTEMKKAILHVYWEEFQKDPVGLMSRVAQPA |
| A708K, | PKNIDQRKLIPVKDGNERLTSSGFACSQCCQPLYVYKLEQVNDKGKPHTNYF |
| P793_, | GRCNVSEHERLILLSPHKPEANDELVTYSLGKFGQRALDFYSIHVTRESNHP |
| Y857R, | VKPLEQIGGNSCASGPVGKALSDACMGAVASFLTKYQDIIIEHQKVIKKNEK |
| 1658V, | RLANLKDIASANGLAFPKITLPPQPHTKEGIEAYNNVVAQIVIWVNLNLWQK |
| Y797L, | LKIGRDEAKPLQRLKGFPSFPLVERQANEVDWWDMVCNVKKLINEKKEDGKV |
| L404K | FWQNLAGYKRQEALRPYLSSEEDRKKGKKFARYQFGDLLKHLEKKHGEDWGK |
| | VYDEAWERIDKKVEGLSKHIKLEEERRSEDAQSKAALTDWLRAKASFVIEGL |
| | KEADKDEFCRCELKLQKWYGDLRGKPFAIEAENSILDISGFSKQYNCAFIWQ |
| | KDGVKKLNLYLIINYFKGGKLRFKKIKPEAFEANRFYTVINKKSGEIVPMEV |
| | NFNFDDPNLIILPLAFGKRQGREFIWNDLLSLETGSLKLANGRVIEKTLYNR |
| | RTRQDEPALFVALTFERREVLDSSNIKPMNLIGVDRGENIPAVIALTDPEGC |
| | PLSRFKDSLGNPTHILRIGESYKEKQRTIQAKKEVEQRRAGGYSRKYASKAK |
| | NLADDMVRNTARDLLYYAVTQDAMLIFENLSRGFGRQGKRTFMAERQYTRME |
| | DWLTAKLAYEGLSKTLLSKTLAQYTSKTCSNCGFTITSADYDRVLEKLKKTA |
| | TGWMTTINGKELKVEGQITYYNRRKRQNVVKDLSVELDRLSEESVNNDISSW |
| | TKGRSGEALSLLKKRFSHRPVQEKFVCLNCGFETHADEQAALNIARSWLFLR |
| | SQEYKKYQTNKTTGNTDKRAFVETWQSFYRKKLKEVWKPAV (SEQ ID |
| | NO: 100) |
| 445: | MQEIKRINKIRRRLVKDSNTKKAGKTGPMKTLLVRVMTPDLRERLENLRKKP |
| L379R, | ENIPQPISNTSRANLNKLLTDYTEMKKAILHVYWEEFQKDPVGLMSRVAQPA |
| A708K, | PKNIDQRKLIPVKDGNERLTSSGFACSQCCQPLYVYKLEQVNDKGKPHTNYF |
| P793_, | GRCNVSEHERLILLSPHKPEANDELVTYSLGKFGQRALDFYSIHVTRESNHP |
| Y857R, | VKPLEQIGGNSCASGPVGKALSDACMGAVASFLTKYQDIIIEHQKVIKKNEK |
| 1658V, | RLANLKDIASANGLAFPKITLPPQPHTKEGIEAYNNVVAQIVIWVNLNLWQK |
| Y797L, | LKIGRDEAKPLQRLKGFPSFPLVERQANEVDWWDMVCNVKKLINEKKEDGKV |
| E386N | FWQNLAGYKRQEALRPYLSSENDRKKGKKFARYQFGDLLLHLEKKHGEDWGK |
| | VYDEAWERIDKKVEGLSKHIKLEEERRSEDAQSKAALTDWLRAKASFVIEGL |
| | KEADKDEFCRCELKLQKWYGDLRGKPFAIEAENSILDISGFSKQYNCAFIWQ |
| | KDGVKKLNLYLIINYFKGGKLRFKKIKPEAFEANRFYTVINKKSGEIVPMEV |
| | NFNFDDPNLIILPLAFGKRQGREFIWNDLLSLETGSLKLANGRVIEKTLYNR |
| | RTRQDEPALFVALTFERREVLDSSNIKPMNLIGVDRGENIPAVIALTDPEGC |
| | PLSRFKDSLGNPTHILRIGESYKEKQRTIQAKKEVEQRRAGGYSRKYASKAK |
| | NLADDMVRNTARDLLYYAVTQDAMLIFENLSRGFGRQGKRTFMAERQYTRME |
| | DWLTAKLAYEGLSKTLLSKTLAQYTSKTCSNCGFTITSADYDRVLEKLKKTA |
| | TGWMTTINGKELKVEGQITYYNRRKRQNVVKDLSVELDRLSEESVNNDISSW |
| | TKGRSGEALSLLKKRFSHRPVQEKFVCLNCGFETHADEQAALNIARSWLFLR |
| | SQEYKKYQTNKTTGNTDKRAFVETWQSFYRKKLKEVWKPAV (SEQ ID |
| | NO: 101) |
| 446: | MQEIKRINKIRRRLVKDSNTKKAGKTGPMKTLLVRVMTPDLRERLENLRKKP |
| L379R, | ENIPQPISNTSRANLNKLLTDYTEMKKAILHVYWEEFQKDPVGLMSRVAQPA |
| A708K, | PKNIDQRKLIPVKDGNERLTSSGFACSQCCQPLYVYKLEQVNDKGKPHTNYF |
| P793_, | GRCNVSEHERLILLSPHKPEANDELVTYSLGKFGQRALDFYSIHVTRESNHP |
| Y857R, | VKPLEQIGGNSCASGPVGKALSDACMGAVASFLTKYQDIIIEHQKVIKKNEK |
| 1658V, | RLANLKDIASANGLAFPKITLPPQPHTKEGIEAYNNVVAQIVIWVNLNLWQK |
| Y797L, | LKIGRDEAKPLQRLKGFPSFPLVERQANEVDWWDMVCNVKKLINEKKEDGKV |
| E386N, | FWQNLAGYKRQEALRPYLSSENDRKKGKKFARYQFGDLLKHLEKKHGEDWGK |
| C477S, | VYDEAWERIDKKVEGLSKHIKLEEERRSEDAQSKAALTDWLRAKASFVIEGL |
| L404K | KEADKDEFSRCELKLQKWYGDLRGKPFAIEAENSILDISGFSKQYNCAFIWQ |
| | KDGVKKLNLYLIINYFKGGKLRFKKIKPEAFEANRFYTVINKKSGEIVPMEV |
| | NFNFDDPNLIILPLAFGKRQGREFIWNDLLSLETGSLKLANGRVIEKTLYNR |
| | RTRQDEPALFVALTFERREVLDSSNIKPMNLIGVDRGENIPAVIALTDPEGC |
| | PLSRFKDSLGNPTHILRIGESYKEKQRTIQAKKEVEQRRAGGYSRKYASKAK |
| | NLADDMVRNTARDLLYYAVTQDAMLIFENLSRGFGRQGKRTFMAERQYTRME |
| | DWLTAKLAYEGLSKTLLSKTLAQYTSKTCSNCGFTITSADYDRVLEKLKKTA |
| | TGWMTTINGKELKVEGQITYYNRRKRQNVVKDLSVELDRLSEESVNNDISSW |
| | TKGRSGEALSLLKKRFSHRPVQEKFVCLNCGFETHADEQAALNIARSWLFLR |
| | SQEYKKYQTNKTTGNTDKRAFVETWQSFYRKKLKEVWKPAV (SEQ ID |
| | NO: 102) |
| 447: | MQEIKRINKIRRRLVKDSNTKKAGKTGPMKTLLVRVMTPDLRERLENLRKKP |
| L379R, | ENIPQPISNTSRANLNKLLTDYTEMKKAILHVYWEEFQKDPVGLMSRVAQPA |
| A708K, | PKNIDQRKLIPVKDGNERLTSSGFACSQCCQPLYVYKLEQVNDKGKPHTNYF |
| P793_, | GRCNVSEHERLILLSPHKPEANDELVTYSLGKFGQRALDFYSIHVTRESNHP |
| Y857R, | VKPLEQIGGNSCASGPVGKALSDACMGAVASFLTKYQDIIIEHQKVIKKNEK |
| E386N | RLANLKDIASANGLAFPKITLPPQPHTKEGIEAYNNVVAQIVIWVNLNLWQK |
| | LKIGRDEAKPLQRLKGFPSFPLVERQANEVDWWDMVCNVKKLINEKKEDGKV |
| | FWQNLAGYKRQEALRPYLSSENDRKKGKKFARYQFGDLLLHLEKKHGEDWGK |
| | VYDEAWERIDKKVEGLSKHIKLEEERRSEDAQSKAALTDWLRAKASFVIEGL |
| | KEADKDEFCRCELKLQKWYGDLRGKPFAIEAENSILDISGFSKQYNCAFIWQ |
| | KDGVKKLNLYLIINYFKGGKLRFKKIKPEAFEANRFYTVINKKSGEIVPMEV |
| | NFNFDDPNLIILPLAFGKRQGREFIWNDLLSLETGSLKLANGRVIEKTLYNR |
| | RTRQDEPALFVALTFERREVLDSSNIKPMNLIGIDRGENIPAVIALTDPEGC |
| | PLSRFKDSLGNPTHILRIGESYKEKQRTIQAKKEVEQRRAGGYSRKYASKAK |
| | NLADDMVRNTARDLLYYAVTQDAMLIFENLSRGFGRQGKRTFMAERQYTRME |
| | DWLTAKLAYEGLSKTYLSKTLAQYTSKTCSNCGFTITSADYDRVLEKLKKTA |
| | TGWMTTINGKELKVEGQITYYNRRKRQNVVKDLSVELDRLSEESVNNDISSW |
| | TKGRSGEALSLLKKRFSHRPVQEKFVCLNCGFETHADEQAALNIARSWLFLR |
| | SQEYKKYQTNKTTGNTDKRAFVETWQSFYRKKLKEVWKPAV (SEQ ID |
| | NO: 103) |
| 448: | MQEIKRINKIRRRLVKDSNTKKAGKTGPMKTLLVRVMTPDLRERLENLRKKP |
| L379R, | ENIPQPISNTSRANLNKLLTDYTEMKKAILHVYWEEFQKDPVGLMSRVAQPA |
| A708K, | PKNIDQRKLIPVKDGNERLTSSGFACSQCCQPLYVYKLEQVNDKGKPHTNYF |
| P793_, | GRCNVSEHERLILLSPHKPEANDELVTYSLGKFGQRALDFYSIHVTRESNHP |
| Y857R, | VKPLEQIGGNSCASGPVGKALSDACMGAVASFLTKYQDIIIEHQKVIKKNEK |
| E386N, | RLANLKDIASANGLAFPKITLPPQPHTKEGIEAYNNVVAQIVIWVNLNLWQK |
| L404K | LKIGRDEAKPLQRLKGFPSFPLVERQANEVDWWDMVCNVKKLINEKKEDGKV |
| | FWQNLAGYKRQEALRPYLSSENDRKKGKKFARYQFGDLLKHLEKKHGEDWGK |
| | VYDEAWERIDKKVEGLSKHIKLEEERRSEDAQSKAALTDWLRAKASFVIEGL |
| | KEADKDEFCRCELKLQKWYGDLRGKPFAIEAENSILDISGFSKQYNCAFIWQ |
| | KDGVKKLNLYLIINYFKGGKLRFKKIKPEAFEANRFYTVINKKSGEIVPMEV |
| | NFNFDDPNLIILPLAFGKRQGREFIWNDLLSLETGSLKLANGRVIEKTLYNR |
| | RTRQDEPALFVALTFERREVLDSSNIKPMNLIGIDRGENIPAVIALTDPEGC |
| | PLSRFKDSLGNPTHILRIGESYKEKQRTIQAKKEVEQRRAGGYSRKYASKAK |
| | NLADDMVRNTARDLLYYAVTQDAMLIFENLSRGFGRQGKRTFMAERQYTRME |
| | DWLTAKLAYEGLSKTYLSKTLAQYTSKTCSNCGFTITSADYDRVLEKLKKTA |
| | TGWMTTINGKELKVEGQITYYNRRKRQNVVKDLSVELDRLSEESVNNDISSW |
| | TKGRSGEALSLLKKRFSHRPVQEKFVCLNCGFETHADEQAALNIARSWLFLR |
| | SQEYKKYQTNKTTGNTDKRAFVETWQSFYRKKLKEVWKPAV (SEQ ID |
| | NO: 104) |
| 449: | MQEIKRINKIRRRLVKDSNTKKAGKTGPMKTLLVRVMTPDLRERLENLRKKP |
| L379R, | ENIPQPISNTSRANLNKLLTDYTEMKKAILHVYWEEFQKDPVGLMSRVAQPA |
| A708K, | PKNIDQRKLIPVKDGNERLTSSGFACSQCCQPLYVYKLEQVNDKGKPHTNYF |
| P793_, | GRCNVSEHERLILLSPHKPEANDELVTYSLGKFGQRALDFYSIHVTRESNHP |
| D732N, | VKPLEQIGGNSCASGPVGKALSDACMGAVASFLTKYQDIIIEHQKVIKKNEK |
| E385P, | RLANLKDIASANGLAFPKITLPPQPHTKEGIEAYNNVVAQIVIWVNLNLWQK |
| Y857R | LKIGRDEAKPLQRLKGFPSFPLVERQANEVDWWDMVCNVKKLINEKKEDGKV |
| | FWQNLAGYKRQEALRPYLSSPEDRKKGKKFARYQFGDLLLHLEKKHGEDWGK |
| | VYDEAWERIDKKVEGLSKHIKLEEERRSEDAQSKAALTDWLRAKASFVIEGL |
| | KEADKDEFCRCELKLQKWYGDLRGKPFAIEAENSILDISGFSKQYNCAFIWQ |
| | KDGVKKLNLYLIINYFKGGKLRFKKIKPEAFEANRFYTVINKKSGEIVPMEV |
| | NFNFDDPNLIILPLAFGKRQGREFIWNDLLSLETGSLKLANGRVIEKTLYNR |
| | RTRQDEPALFVALTFERREVLDSSNIKPMNLIGIDRGENIPAVIALTDPEGC |
| | PLSRFKDSLGNPTHILRIGESYKEKQRTIQAKKEVEQRRAGGYSRKYASKAK |
| | NLANDMVRNTARDLLYYAVTQDAMLIFENLSRGFGRQGKRTFMAERQYTRME |
| | DWLTAKLAYEGLSKTYLSKTLAQYTSKTCSNCGFTITSADYDRVLEKLKKTA |
| | TGWMTTINGKELKVEGQITYYNRRKRQNVVKDLSVELDRLSEESVNNDISSW |
| | TKGRSGEALSLLKKRFSHRPVQEKFVCLNCGFETHADEQAALNIARSWLFLR |
| | SQEYKKYQTNKTTGNTDKRAFVETWQSFYRKKLKEVWKPAV (SEQ ID |
| | NO: 105) |
| 450: | MQEIKRINKIRRRLVKDSNTKKAGKTGPMKTLLVRVMTPDLRERLENLRKKP |
| L379R, | ENIPQPISNTSRANLNKLLTDYTEMKKAILHVYWEEFQKDPVGLMSRVAQPA |
| A708K, | PKNIDQRKLIPVKDGNERLTSSGFACSQCCQPLYVYKLEQVNDKGKPHTNYF |
| P793_, | GRCNVSEHERLILLSPHKPEANDELVTYSLGKFGQRALDFYSIHVTRESNHP |
| D732N, | VKPLEQIGGNSCASGPVGKALSDACMGAVASFLTKYQDIIIEHQKVIKKNEK |
| E385P, | RLANLKDIASANGLAFPKITLPPQPHTKEGIEAYNNVVAQIVIWVNLNLWQK |
| Y857R, | LKIGRDEAKPLQRLKGFPSFPLVERQANEVDWWDMVCNVKKLINEKKEDGKV |
| 1658V | FWQNLAGYKRQEALRPYLSSPEDRKKGKKFARYQFGDLLLHLEKKHGEDWGK |
| | VYDEAWERIDKKVEGLSKHIKLEEERRSEDAQSKAALTDWLRAKASFVIEGL |
| | KEADKDEFCRCELKLQKWYGDLRGKPFAIEAENSILDISGFSKQYNCAFIWQ |
| | KDGVKKLNLYLIINYFKGGKLRFKKIKPEAFEANRFYTVINKKSGEIVPMEV |
| | NFNFDDPNLIILPLAFGKRQGREFIWNDLLSLETGSLKLANGRVIEKTLYNR |
| | RTRQDEPALFVALTFERREVLDSSNIKPMNLIGVDRGENIPAVIALTDPEGC |
| | PLSRFKDSLGNPTHILRIGESYKEKQRTIQAKKEVEQRRAGGYSRKYASKAK |
| | NLANDMVRNTARDLLYYAVTQDAMLIFENLSRGFGRQGKRTFMAERQYTRME |
| | DWLTAKLAYEGLSKTYLSKTLAQYTSKTCSNCGFTITSADYDRVLEKLKKTA |
| | TGWMTTINGKELKVEGQITYYNRRKRQNVVKDLSVELDRLSEESVNNDISSW |
| | TKGRSGEALSLLKKRFSHRPVQEKFVCLNCGFETHADEQAALNIARSWLFLR |
| | SQEYKKYQTNKTTGNTDKRAFVETWQSFYRKKLKEVWKPAV (SEQ ID |
| | NO: 106) |
| 451: | MQEIKRINKIRRRLVKDSNTKKAGKTGPMKTLLVRVMTPDLRERLENLRKKP |
| L379R, | ENIPQPISNTSRANLNKLLTDYTEMKKAILHVYWEEFQKDPVGLMSRVAQPA |
| A708K, | PKNIDQRKLIPVKDGNERLTSSGFACSQCCQPLYVYKLEQVNDKGKPHTNYF |
| P793_, | GRCNVSEHERLILLSPHKPEANDELVTYSLGKFGQRALDFYSIHVTRESNHP |
| D732N, | VKPLEQIGGNSCASGPVGKALSDACMGAVASFLTKYQDIIIEHQKVIKKNEK |
| E385P, | RLANLKDIASANGLAFPKITLPPQPHTKEGIEAYNNVVAQIVIWVNLNLWQK |
| Y857R, | LKIGRDEAKPLQRLKGFPSFPLVERQANEVDWWDMVCNVKKLINEKKEDGKV |
| 1658V, | FWQNLAGYKRQEALRPYLSSPEDRKKGKKFARYQLGDLLLHLEKKHGEDWGK |
| F399L | VYDEAWERIDKKVEGLSKHIKLEEERRSEDAQSKAALTDWLRAKASFVIEGL |
| | KEADKDEFCRCELKLQKWYGDLRGKPFAIEAENSILDISGFSKQYNCAFIWQ |
| | KDGVKKLNLYLIINYFKGGKLRFKKIKPEAFEANRFYTVINKKSGEIVPMEV |
| | NFNFDDPNLIILPLAFGKRQGREFIWNDLLSLETGSLKLANGRVIEKTLYNR |
| | RTRQDEPALFVALTFERREVLDSSNIKPMNLIGVDRGENIPAVIALTDPEGC |
| | PLSRFKDSLGNPTHILRIGESYKEKQRTIQAKKEVEQRRAGGYSRKYASKAK |
| | NLANDMVRNTARDLLYYAVTQDAMLIFENLSRGFGRQGKRTFMAERQYTRME |
| | DWLTAKLAYEGLSKTYLSKTLAQYTSKTCSNCGFTITSADYDRVLEKLKKTA |
| | TGWMTTINGKELKVEGQITYYNRRKRQNVVKDLSVELDRLSEESVNNDISSW |
| | TKGRSGEALSLLKKRFSHRPVQEKFVCLNCGFETHADEQAALNIARSWLFLR |
| | SQEYKKYQTNKTTGNTDKRAFVETWQSFYRKKLKEVWKPAV (SEQ ID |
| | NO: 107) |
| 452: | MQEIKRINKIRRRLVKDSNTKKAGKTGPMKTLLVRVMTPDLRERLENLRKKP |
| L379R, | ENIPQPISNTSRANLNKLLTDYTEMKKAILHVYWEEFQKDPVGLMSRVAQPA |
| A708K, | PKNIDQRKLIPVKDGNERLTSSGFACSQCCQPLYVYKLEQVNDKGKPHTNYF |
| P793_, | GRCNVSEHERLILLSPHKPEANDELVTYSLGKFGQRALDFYSIHVTRESNHP |
| D732N, | VKPLEQIGGNSCASGPVGKALSDACMGAVASFLTKYQDIIIEHQKVIKKNEK |
| E385P, | RLANLKDIASANGLAFPKITLPPQPHTKEGIEAYNNVVAQIVIWVNLNLWQK |
| Y857R, | LKIGRDEAKPLQRLKGFPSFPLVERQANEVDWWDMVCNVKKLINEKKEDGKV |
| 1658V, | FWQNLAGYKRQEALRPYLSSPNDRKKGKKFARYQFGDLLLHLEKKHGEDWGK |
| E386N | VYDEAWERIDKKVEGLSKHIKLEEERRSEDAQSKAALTDWLRAKASFVIEGL |
| | KEADKDEFCRCELKLQKWYGDLRGKPFAIEAENSILDISGFSKQYNCAFIWQ |
| | KDGVKKLNLYLIINYFKGGKLRFKKIKPEAFEANRFYTVINKKSGEIVPMEV |
| | NFNFDDPNLIILPLAFGKRQGREFIWNDLLSLETGSLKLANGRVIEKTLYNR |
| | RTRQDEPALFVALTFERREVLDSSNIKPMNLIGVDRGENIPAVIALTDPEGC |
| | PLSRFKDSLGNPTHILRIGESYKEKQRTIQAKKEVEQRRAGGYSRKYASKAK |
| | NLANDMVRNTARDLLYYAVTQDAMLIFENLSRGFGRQGKRTFMAERQYTRME |
| | DWLTAKLAYEGLSKTYLSKTLAQYTSKTCSNCGFTITSADYDRVLEKLKKTA |
| | TGWMTTINGKELKVEGQITYYNRRKRQNVVKDLSVELDRLSEESVNNDISSW |
| | TKGRSGEALSLLKKRFSHRPVQEKFVCLNCGFETHADEQAALNIARSWLFLR |
| | SQEYKKYQTNKTTGNTDKRAFVETWQSFYRKKLKEVWKPAV (SEQ ID |
| | NO: 108) |
| 453: | MQEIKRINKIRRRLVKDSNTKKAGKTGPMKTLLVRVMTPDLRERLENLRKKP |
| L379R, | ENIPQPISNTSRANLNKLLTDYTEMKKAILHVYWEEFQKDPVGLMSRVAQPA |
| A708K, | PKNIDQRKLIPVKDGNERLTSSGFACSQCCQPLYVYKLEQVNDKGKPHTNYF |
| P793_, | GRCNVSEHERLILLSPHKPEANDELVTYSLGKFGQRALDFYSIHVTRESNHP |
| D732N, | VKPLEQIGGNSCASGPVGKALSDACMGAVASFLTKYQDIIIEHQKVIKKNEK |
| E385P, | RLANLKDIASANGLAFPKITLPPQPHTKEGIEAYNNVVAQIVIWVNLNLWQK |
| Y857R, | LKIGRDEAKPLQRLKGFPSFPLVERQANEVDWWDMVCNVKKLINEKKEDGKV |
| 1658V, | FWQNLAGYKRQEALRPYLSSPEDRKKGKKFARYQFGDLLKHLEKKHGEDWGK |
| L404K | VYDEAWERIDKKVEGLSKHIKLEEERRSEDAQSKAALTDWLRAKASFVIEGL |
| | KEADKDEFCRCELKLQKWYGDLRGKPFAIEAENSILDISGFSKQYNCAFIWQ |
| | KDGVKKLNLYLIINYFKGGKLRFKKIKPEAFEANRFYTVINKKSGEIVPMEV |
| | NFNFDDPNLIILPLAFGKRQGREFIWNDLLSLETGSLKLANGRVIEKTLYNR |
| | RTRQDEPALFVALTFERREVLDSSNIKPMNLIGVDRGENIPAVIALTDPEGC |
| | PLSRFKDSLGNPTHILRIGESYKEKQRTIQAKKEVEQRRAGGYSRKYASKAK |
| | NLANDMVRNTARDLLYYAVTQDAMLIFENLSRGFGRQGKRTFMAERQYTRME |
| | DWLTAKLAYEGLSKTYLSKTLAQYTSKTCSNCGFTITSADYDRVLEKLKKTA |
| | TGWMTTINGKELKVEGQITYYNRRKRQNVVKDLSVELDRLSEESVNNDISSW |
| | TKGRSGEALSLLKKRFSHRPVQEKFVCLNCGFETHADEQAALNIARSWLFLR |
| | SQEYKKYQTNKTTGNTDKRAFVETWQSFYRKKLKEVWKPAV (SEQ ID |
| | NO: 109) |
| 454: | MQEIKRINKIRRRLVKDSNTKKAGKTGPMKTLLVRVMTPDLRERLENLRKKP |
| L379R, | ENIPQPISNTSRANLNKLLTDYTEMKKAILHVYWEEFQKDPVGLMSRVAQPA |
| A708K, | PKNIDQRKLIPVKDGNERLTSSGFACSQCCQPLYVYKLEQVNDKGKPHTNYF |
| P793_, | GRCNVSEHERLILLSPHKPEANDELVTYSLGKFGQRALDFYSIHVTRESNHP |
| T620P, | VKPLEQIGGNSCASGPVGKALSDACMGAVASFLTKYQDIIIEHKKVIKKNEK |
| E385P, | RLANLKDIASANGLAFPKITLPPQPHTKEGIEAYNNVVAQIVIWVNLNLWQK |
| Y857R, | LKIGRDEAKPLQRLKGFPSFPLVERQANEVDWWDMVCNVKKLINEKKEDGKV |
| Q252K | FWQNLAGYKRQEALRPYLSSPEDRKKGKKFARYQFGDLLLHLEKKHGEDWGK |
| | VYDEAWERIDKKVEGLSKHIKLEEERRSEDAQSKAALTDWLRAKASFVIEGL |
| | KEADKDEFCRCELKLQKWYGDLRGKPFAIEAENSILDISGFSKQYNCAFIWQ |
| | KDGVKKLNLYLIINYFKGGKLRFKKIKPEAFEANRFYTVINKKSGEIVPMEV |
| | NFNFDDPNLIILPLAFGKRQGREFIWNDLLSLETGSLKLANGRVIEKPLYNR |
| | RTRQDEPALFVALTFERREVLDSSNIKPMNLIGIDRGENIPAVIALTDPEGC |
| | PLSRFKDSLGNPTHILRIGESYKEKQRTIQAKKEVEQRRAGGYSRKYASKAK |
| | NLADDMVRNTARDLLYYAVTQDAMLIFENLSRGFGRQGKRTFMAERQYTRME |
| | DWLTAKLAYEGLSKTYLSKTLAQYTSKTCSNCGFTITSADYDRVLEKLKKTA |
| | TGWMTTINGKELKVEGQITYYNRRKRQNVVKDLSVELDRLSEESVNNDISSW |
| | TKGRSGEALSLLKKRFSHRPVQEKFVCLNCGFETHADEQAALNIARSWLFLR |
| | SQEYKKYQTNKTTGNTDKRAFVETWQSFYRKKLKEVWKPAV (SEQ ID |
| | NO: 110) |
| 455: | MQEIKRINKIRRRLVKDSNTKKAGKTGPMKTLLVRVMTPDLRERLENLRKKP |
| L379R, | ENIPQPISNTSRANLNKLLTDYTEMKKAILHVYWEEFQKDPVGLMSRVAQPA |
| A708K, | PKNIDQRKLIPVKDGNERLTSSGFACSQCCQPLYVYKLEQVNDKGKPHTNYF |
| P793_, | GRCNVSEHERLILLSPHKPEANDELVTYSLGKFGQRALDFYSIHVTRESNHP |
| T620P, | VKPLEQIGGNSCASGPVGKALSDACMGAVASFLTKYQDIIIEHKKVIKKNEK |
| E385P, | RLANLKDIASANGLAFPKITLPPQPHTKEGIEAYNNVVAQIVIWVNLNLWQK |
| Y857R, | LKIGRDEAKPLQRLKGFPSFPLVERQANEVDWWDMVCNVKKLINEKKEDGKV |
| 1658V, | FWQNLAGYKRQEALRPYLSSPEDRKKGKKFARYQFGDLLLHLEKKHGEDWGK |
| Q252K | VYDEAWERIDKKVEGLSKHIKLEEERRSEDAQSKAALTDWLRAKASFVIEGL |
| | KEADKDEFCRCELKLQKWYGDLRGKPFAIEAENSILDISGFSKQYNCAFIWQ |
| | KDGVKKLNLYLIINYFKGGKLRFKKIKPEAFEANRFYTVINKKSGEIVPMEV |
| | NFNFDDPNLIILPLAFGKRQGREFIWNDLLSLETGSLKLANGRVIEKPLYNR |
| | RTRQDEPALFVALTFERREVLDSSNIKPMNLIGVDRGENIPAVIALTDPEGC |
| | PLSRFKDSLGNPTHILRIGESYKEKQRTIQAKKEVEQRRAGGYSRKYASKAK |
| | NLADDMVRNTARDLLYYAVTQDAMLIFENLSRGFGRQGKRTFMAERQYTRME |
| | DWLTAKLAYEGLSKTYLSKTLAQYTSKTCSNCGFTITSADYDRVLEKLKKTA |
| | TGWMTTINGKELKVEGQITYYNRRKRQNVVKDLSVELDRLSEESVNNDISSW |
| | TKGRSGEALSLLKKRFSHRPVQEKFVCLNCGFETHADEQAALNIARSWLFLR |
| | SQEYKKYQTNKTTGNTDKRAFVETWQSFYRKKLKEVWKPAV (SEQ ID |
| | NO: 111) |
| 456: | MQEIKRINKIRRRLVKDSNTKKAGKTGPMKTLLVRVMTPDLRERLENLRKKP |
| L379R, | ENIPQPISNTSRANLNKLLTDYTEMKKAILHVYWEEFQKDPVGLMSRVAQPA |
| A708K, | PKNIDQRKLIPVKDGNERLTSSGFACSQCCQPLYVYKLEQVNDKGKPHTNYF |
| P793_, | GRCNVSEHERLILLSPHKPEANDELVTYSLGKFGQRALDFYSIHVTRESNHP |
| T620P, | VKPLEQIGGNSCASGPVGKALSDACMGAVASFLTKYQDIIIEHKKVIKKNEK |
| E385P, | RLANLKDIASANGLAFPKITLPPQPHTKEGIEAYNNVVAQIVIWVNLNLWQK |
| Y857R, | LKIGRDEAKPLQRLKGFPSFPLVERQANEVDWWDMVCNVKKLINEKKEDGKV |
| 1658V, | FWQNLAGYKRQEALRPYLSSPNDRKKGKKFARYQFGDLLLHLEKKHGEDWGK |
| E386N, | VYDEAWERIDKKVEGLSKHIKLEEERRSEDAQSKAALTDWLRAKASFVIEGL |
| Q252K | KEADKDEFCRCELKLQKWYGDLRGKPFAIEAENSILDISGFSKQYNCAFIWQ |
| | KDGVKKLNLYLIINYFKGGKLRFKKIKPEAFEANRFYTVINKKSGEIVPMEV |
| | NFNFDDPNLIILPLAFGKRQGREFIWNDLLSLETGSLKLANGRVIEKPLYNR |
| | RTRQDEPALFVALTFERREVLDSSNIKPMNLIGVDRGENIPAVIALTDPEGC |
| | PLSRFKDSLGNPTHILRIGESYKEKQRTIQAKKEVEQRRAGGYSRKYASKAK |
| | NLADDMVRNTARDLLYYAVTQDAMLIFENLSRGFGRQGKRTFMAERQYTRME |
| | DWLTAKLAYEGLSKTYLSKTLAQYTSKTCSNCGFTITSADYDRVLEKLKKTA |
| | TGWMTTINGKELKVEGQITYYNRRKRQNVVKDLSVELDRLSEESVNNDISSW |
| | TKGRSGEALSLLKKRFSHRPVQEKFVCLNCGFETHADEQAALNIARSWLFLR |
| | SQEYKKYQTNKTTGNTDKRAFVETWQSFYRKKLKEVWKPAV (SEQ ID |
| | NO: 112) |
| 457: | MQEIKRINKIRRRLVKDSNTKKAGKTGPMKTLLVRVMTPDLRERLENLRKKP |
| L379R, | ENIPQPISNTSRANLNKLLTDYTEMKKAILHVYWEEFQKDPVGLMSRVAQPA |
| A708K, | PKNIDQRKLIPVKDGNERLTSSGFACSQCCQPLYVYKLEQVNDKGKPHTNYF |
| P793_, | GRCNVSEHERLILLSPHKPEANDELVTYSLGKFGQRALDFYSIHVTRESNHP |
| T620P, | VKPLEQIGGNSCASGPVGKALSDACMGAVASFLTKYQDIIIEHKKVIKKNEK |
| E385P, | RLANLKDIASANGLAFPKITLPPQPHTKEGIEAYNNVVAQIVIWVNLNLWQK |
| Y857R, | LKIGRDEAKPLQRLKGFPSFPLVERQANEVDWWDMVCNVKKLINEKKEDGKV |
| 1658V, | FWQNLAGYKRQEALRPYLSSPEDRKKGKKFARYQLGDLLLHLEKKHGEDWGK |
| F399L, | VYDEAWERIDKKVEGLSKHIKLEEERRSEDAQSKAALTDWLRAKASFVIEGL |
| Q252K | KEADKDEFCRCELKLQKWYGDLRGKPFAIEAENSILDISGFSKQYNCAFIWQ |
| | KDGVKKLNLYLIINYFKGGKLRFKKIKPEAFEANRFYTVINKKSGEIVPMEV |
| | NFNFDDPNLIILPLAFGKRQGREFIWNDLLSLETGSLKLANGRVIEKPLYNR |
| | RTRQDEPALFVALTFERREVLDSSNIKPMNLIGVDRGENIPAVIALTDPEGC |
| | PLSRFKDSLGNPTHILRIGESYKEKQRTIQAKKEVEQRRAGGYSRKYASKAK |
| | NLADDMVRNTARDLLYYAVTQDAMLIFENLSRGFGRQGKRTFMAERQYTRME |
| | DWLTAKLAYEGLSKTYLSKTLAQYTSKTCSNCGFTITSADYDRVLEKLKKTA |
| | TGWMTTINGKELKVEGQITYYNRRKRQNVVKDLSVELDRLSEESVNNDISSW |
| | TKGRSGEALSLLKKRFSHRPVQEKFVCLNCGFETHADEQAALNIARSWLFLR |
| | SQEYKKYQTNKTTGNTDKRAFVETWQSFYRKKLKEVWKPAV (SEQ ID |
| | NO: 113) |
| 458: | MQEIKRINKIRRRLVKDSNTKKAGKTGPMKTLLVRVMTPDLRERLENLRKKP |
| L379R, | ENIPQPISNTSRANLNKLLTDYTEMKKAILHVYWEEFQKDPVGLMSRVAQPA |
| A708K, | PKNIDQRKLIPVKDGNERLTSSGFACSQCCQPLYVYKLEQVNDKGKPHTNYF |
| P793_, | GRCNVSEHERLILLSPHKPEANDELVTYSLGKFGQRALDFYSIHVTRESNHP |
| T620P, | VKPLEQIGGNSCASGPVGKALSDACMGAVASFLTKYQDIIIEHKKVIKKNEK |
| E385P, | RLANLKDIASANGLAFPKITLPPQPHTKEGIEAYNNVVAQIVIWVNLNLWQK |
| Y857R, | LKIGRDEAKPLQRLKGFPSFPLVERQANEVDWWDMVCNVKKLINEKKEDGKV |
| 1658V, | FWQNLAGYKRQEALRPYLSSPEDRKKGKKFARYQFGDLLKHLEKKHGEDWGK |
| L404K, | VYDEAWERIDKKVEGLSKHIKLEEERRSEDAQSKAALTDWLRAKASFVIEGL |
| Q252K | KEADKDEFCRCELKLQKWYGDLRGKPFAIEAENSILDISGFSKQYNCAFIWQ |
| | KDGVKKLNLYLIINYFKGGKLRFKKIKPEAFEANRFYTVINKKSGEIVPMEV |
| | NFNFDDPNLIILPLAFGKRQGREFIWNDLLSLETGSLKLANGRVIEKPLYNR |
| | RTRQDEPALFVALTFERREVLDSSNIKPMNLIGVDRGENIPAVIALTDPEGC |
| | PLSRFKDSLGNPTHILRIGESYKEKQRTIQAKKEVEQRRAGGYSRKYASKAK |
| | NLADDMVRNTARDLLYYAVTQDAMLIFENLSRGFGRQGKRTFMAERQYTRME |
| | DWLTAKLAYEGLSKTYLSKTLAQYTSKTCSNCGFTITSADYDRVLEKLKKTA |
| | TGWMTTINGKELKVEGQITYYNRRKRQNVVKDLSVELDRLSEESVNNDISSW |
| | TKGRSGEALSLLKKRFSHRPVQEKFVCLNCGFETHADEQAALNIARSWLFLR |
| | SQEYKKYQTNKTTGNTDKRAFVETWQSFYRKKLKEVWKPAV (SEQ ID |
| | NO: 114) |
| 459: | MQEIKRINKIRRRLVKDSNTKKAGKTGPMKTLLVRVMTPDLRERLENLRKKP |
| L379R, | ENIPQPISNTSRANLNKLLTDYTEMKKAILHVYWEEFQKDPVGLMSRVAQPA |
| A708K, | PKNIDQRKLIPVKDGNERLTSSGFACSQCCQPLYVYKLEQVNDKGKPHTNYF |
| P793_, | GRCNVSEHERLILLSPHKPEANDELVTYSLGKFGQRALDFYSIHVTRESNHP |
| T620P, | VKPLEQIGGNSCASGPVGKALSDACMGAVASFLTKYQDIIIEHQKVIKKNEK |
| Y857R, | RLANLKDIASANGLAFPKITLPPQPHTKEGIEAYNNVVAQIVIWVNLNLWQK |
| 1658V, | LKIGRDEAKPLQRLKGFPSFPLVERQANEVDWWDMVCNVKKLINEKKEDGKV |
| E386N | FWQNLAGYKRQEALRPYLSSENDRKKGKKFARYQFGDLLLHLEKKHGEDWGK |
| | VYDEAWERIDKKVEGLSKHIKLEEERRSEDAQSKAALTDWLRAKASFVIEGL |
| | KEADKDEFCRCELKLQKWYGDLRGKPFAIEAENSILDISGFSKQYNCAFIWQ |
| | KDGVKKLNLYLIINYFKGGKLRFKKIKPEAFEANRFYTVINKKSGEIVPMEV |
| | NFNFDDPNLIILPLAFGKRQGREFIWNDLLSLETGSLKLANGRVIEKPLYNR |
| | RTRQDEPALFVALTFERREVLDSSNIKPMNLIGVDRGENIPAVIALTDPEGC |
| | PLSRFKDSLGNPTHILRIGESYKEKQRTIQAKKEVEQRRAGGYSRKYASKAK |
| | NLADDMVRNTARDLLYYAVTQDAMLIFENLSRGFGRQGKRTFMAERQYTRME |
| | DWLTAKLAYEGLSKTYLSKTLAQYTSKTCSNCGFTITSADYDRVLEKLKKTA |
| | TGWMTTINGKELKVEGQITYYNRRKRQNVVKDLSVELDRLSEESVNNDISSW |
| | TKGRSGEALSLLKKRFSHRPVQEKFVCLNCGFETHADEQAALNIARSWLFLR |
| | SQEYKKYQTNKTTGNTDKRAFVETWQSFYRKKLKEVWKPAV (SEQ ID |
| | NO: 115) |
| 460: | MQEIKRINKIRRRLVKDSNTKKAGKTGPMKTLLVRVMTPDLRERLENLRKKP |
| L379R, | ENIPQPISNTSRANLNKLLTDYTEMKKAILHVYWEEFQKDPVGLMSRVAQPA |
| A708K, | PKNIDQRKLIPVKDGNERLTSSGFACSQCCQPLYVYKLEQVNDKGKPHTNYF |
| P793_, | GRCNVSEHERLILLSPHKPEANDELVTYSLGKFGQRALDFYSIHVTRESNHP |
| T620P, | VKPLEQIGGNSCASGPVGKALSDACMGAVASFLTKYQDIIIEHKKVIKKNEK |
| E385P, | RLANLKDIASANGLAFPKITLPPQPHTKEGIEAYNNVVAQIVIWVNLNLWQK |
| Q252K | LKIGRDEAKPLQRLKGFPSFPLVERQANEVDWWDMVCNVKKLINEKKEDGKV |
| | FWQNLAGYKRQEALRPYLSSPEDRKKGKKFARYQFGDLLLHLEKKHGEDWGK |
| | VYDEAWERIDKKVEGLSKHIKLEEERRSEDAQSKAALTDWLRAKASFVIEGL |
| | KEADKDEFCRCELKLQKWYGDLRGKPFAIEAENSILDISGFSKQYNCAFIWQ |
| | KDGVKKLNLYLIINYFKGGKLRFKKIKPEAFEANRFYTVINKKSGEIVPMEV |
| | NFNFDDPNLIILPLAFGKRQGREFIWNDLLSLETGSLKLANGRVIEKPLYNR |
| | RTRQDEPALFVALTFERREVLDSSNIKPMNLIGIDRGENIPAVIALTDPEGC |
| | PLSRFKDSLGNPTHILRIGESYKEKQRTIQAKKEVEQRRAGGYSRKYASKAK |
| | NLADDMVRNTARDLLYYAVTQDAMLIFENLSRGFGRQGKRTFMAERQYTRME |
| | DWLTAKLAYEGLSKTYLSKTLAQYTSKTCSNCGFTITSADYDRVLEKLKKTA |
| | TGWMTTINGKELKVEGQITYYNRYKRQNVVKDLSVELDRLSEESVNNDISSW |
| | TKGRSGEALSLLKKRFSHRPVQEKFVCLNCGFETHADEQAALNIARSWLFLR |
| | SQEYKKYQTNKTTGNTDKRAFVETWQSFYRKKLKEVWKPAV (SEQ ID |
| | NO: 116) |
| 278 | QEIKRINKIRRRLVKDSNTKKAGKTGPMKTLLVRVMTPDLRERLENLRKKPE |
| | NIPQPISNTSRANLNKLLTDYTEMKKAILHVYWEEFQKDPVGLMSRVAQPAP |
| | KNIDQRKLIPVKDGNERLTSSGFACSQCCQPLYVYKLEQVNDKGKPHTNYFG |
| | RCNVSEHERLILLSPHKPEANDELVTYSLGKFGQRALDFYSIHVTRESNHPV |
| | KPLEQIGGNSCASGPVGKALSDACMGAVASFLTKYQDIIIEHQKVIKKNEKR |
| | LANLKDIASANGLAFPKITLPPQPHTKEGIEAYNNVVAQIVIWVNLNLWQKL |
| | KIGRDEAKPLQRLKGFPSFPLVERQANEVDWWDMVCNVKKLINEKKEDGKVF |
| | WQNLAGYKRQEALRPYLSSEEDRKKGKKFARYQFGDLLLHLEKKHGEDWGKV |
| | YDEAWERIDKKVEGLSKHIKLEEERRSEDAQSKAALTDWLRAKASFVIEGLK |
| | EADKDEFCRCELKLQKWYGDLRGKPFAIEAENSILDISGFSKQYNCAFIWQK |
| | DGVKKLNLYLIINYFKGGKLRFKKIKPEAFEANRFYTVINKKSGEIVPMEVN |
| | FNFDDPNLIILPLAFGKRQGREFIWNDLLSLETGSLKLANGRVIEKTLYNRR |
| | TRQDEPALFVALTFERREVLDSSNIKPMNLIGIDRGENIPAVIALTDPEGCP |
| | LSRFKDSLGNPTHILRIGESYKEKQRTIQAKKEVEQRRAGGYSRKYASKAKN |
| | LADDMVRNTARDLLYYAVTQDAMLIFENLSRGFGRQGKRTFMAERQYTRMED |
| | WLTAKLAYEGLSKTYLSKTLAQYTSKTCSNCGFTITSADYDRVLEKLKKTAT |
| | GWMTTINGKELKVEGQITYYNRYKRQNVVKDLSVELDRLSEESVNNDISSWT |
| | KGRSGEALSLLKKRFSHRPVQEKFVCLNCGFETHADEQAALNIARSWLFLRS |
| | QEYKKYQTNKTTGNTDKRAFVETWQSFYRKKLKEVWKPAV (SEQ ID NO: |
| | 117) |
| 279 | MQEIKRINKIRRRLVKDSNTKKAGKTGPMKTLLVRVMTPDLRERLENLRKKP |
| | ENIPQPISNTSRANLNKLLTDYTEMKKAILHVYWEEFQKDPVGLMSRVAQPA |
| | PKNIDQRKLIPVKDGNERLTSSGFACSQCCQPLYVYKLEQVNDKGKPHTNYF |
| | GRCNVSEHERLILLSPHKPEANDELVTYSLGKFGQRALDFYSIHVTRESNHP |
| | VKPLEQIGGNSCASGPVGKALSDACMGAVASFLTKYQDIIIEHQKVIKKNEK |
| | RLANLKDIASANGLAFPKITLPPQPHTKEGIEAYNNVVAQIVIWVNLNLWQK |
| | LKIGRDEAKPLQRLKGFPSFPLVERQANEVDWWDMVCNVKKLINEKKEDGKV |
| | FWQNLAGYKRQEALRPYLSSEEDRKKGKKFARYQFGDLLLHLEKKHGEDWGK |
| | VYDEAWERIDKKVEGLSKHIKLEEERRSEDAQSKAALTDWLRAKASFVIEGL |
| | KEADKDEFCRCELKLQKWYGDLRGKPFAIEAENSILDISGFSKQYNCAFIWQ |
| | KDGVKKLNLYLIINYFKGGKLRFKKIKPEAFEANRFYTVINKKSGEIVPMEV |
| | NFNFDDPNLIILPLAFGKRQGREFIWNDLLSLETGSLKLANGRVIEKTLYNR |
| | RTRQDEPALFVALTFERREVLDSSNIKPMNLIGIDRGENIPAVIALTDPEGC |
| | PLSRFKDSLGNPTHILRIGESYKEKQRTIQAKKEVEQRRAGGYSRKYASKAK |
| | NLADDMVRNTARDLLYYAVTQDAMLIFENLSRGFGRQGKRTFMAERQYTRME |
| | DWLTAKLAYEGLSKTYLSKTLAQYTSKTCSNCGFTITSADYDRVLEKLKKTA |
| | TGWMTTINGKELKVEGQITYYNRYKRQNVVKDLSVELDRLSEESVNNDISSW |
| | TKGRSGEALSLLKKRFSHRPVQEKFVCLNCGFETHADEQAALNIARSWLFLR |
| | SQEYKKYQTNKTTGNTDKRAFVETWQSFYRKKLKEVWKPAV (SEQ ID |
| | NO: 118) |
| 280 | MQEIKRINKIRRRLVKDSNTKKAGKTGPMKTLLVRVMTPDLRERLENLRKKP |
| | ENIPQPISNTSRANLNKLLTDYTEMKKAILHVYWEEFQKDPVGLMSRVAQPA |
| | PKNIDQRKLIPVKDGNERLTSSGFACSQCCQPLYVYKLEQVNDKGKPHTNYF |
| | GRCNVSEHERLILLSPHKPEANDELVTYSLGKFGQRALDFYSIHVTRESNHP |
| | VKPLEQIGGNSCASGPVGKALSDACMGAVASFLTKYQDIIIEHQKVIKKNEK |
| | RLANLKDIASANGLAFPKITLPPQPHTKEGIEAYNNVVAQIVIWVNLNLWQK |
| | LKIGRDEAKPLQRLKGFPSFPLVERQANEVDWWDMVCNVKKLINEKKEDGKV |
| | FWQNLAGYKRQEALRPYLSSEEDRKKGKKFARYQFGDLLLHLEKKHGEDWGK |
| | VYDEAWERIDKKVEGLSKHIKLEEERRSEDAQSKAALTDWLRAKASFVIEGL |
| | KEADKDEFCRCELKLQKWYGDLRGKPFAIEAENSILDISGFSKQYNCAFIWQ |
| | KDGVKKLNLYLIINYFKGGKLRFKKIKPEAFEANRFYTVINKKSGEIVPMEV |
| | NFNFDDPNLIILPLAFGKRQGREFIWNDLLSLETGSLKLANGRVIEKTLYNR |
| | RTRQDEPALFVALTFERREVLDSSNIKPMNLIGIDRGENIPAVIALTDPEGC |
| | PLSRFKDSLGNPTHILRIGESYKEKQRTIQAKKEVEQRRAGGYSRKYASKAK |
| | NLADDMVRNTARDLLYYAVTQDAMLIFENLSRGFGRQGKRTFMAERQYTRME |
| | DWLTAKLAYEGLSKTYLSKTLAQYTSKTCSNCGFTITSADYDRVLEKLKKTA |
| | TGWMTTINGKELKVEGQITYYNRYKRQNVVKDLSVELDRLSEESVNNDISSW |
| | TKGRSGEALSLLKKRFSHRPVQEKFVCLNCGFETHADEQAALNIARSWLFLR |
| | SQEYKKYQTNKTTGNTDKRAFVETWQSFYRKKLKEVWKPAV (SEQ ID |
| | NO: 119) |
| 285 | MQEIKRINKIRRRLVKDSNTKKAGKTGPMKTLLVRVMTPDLRERLENLRKKP |
| | ENIPQPISNTSRANLNKLLTDYTEMKKAILHVYWEEFQKDPVGLMSRVAQPA |
| | PKNIDQRKLIPVKDGNERLTSSGFACSQCCQPLYVYKLEQVNDKGKPHTNYF |
| | GRCNVSEHERLILLSPHKPEANDELVTYSLGKFGQRALDFYSIHVTRESNHP |
| | VKPLEQIGGNSCASGPVGKALSDACMGAVASFLTKYQDIIIEHQKVIKKNEK |
| | RLANLKDIASANGLAFPKITLPPQPHTKEGIEAYNNVVAQIVIWVNLNLWQK |
| | LKIGRDEAKPLQRLKGFPSFPLVERQANEVDWWDMVCNVKKLINEKKEDGKV |
| | FWQNLAGYKRQEALRPYLSSEEDRKKGKKFARYQFGDLLLHLEKKHGEDWGK |
| | VYDEAWERIDKKVEGLSKHIKLEEERRSEDAQSKAALTDWLRAKASFVIEGL |
| | KEADKDEFCRCELKLQKWYGDLRGKPFAIEAENSILDISGFSKQYNCAFIWQ |
| | KDGVKKLNLYLIINYFKGGKLRFKKIKPEAFEANRFYTVINKKSGEIVPMEV |
| | NFNFDDPNLIILPLAFGKRQGREFIWNDLLSLETGSLKLANGRVIEKTLYNR |
| | RTRQDEPALFVALTFERREVLDSSNIKPMNLIGIDRGENIPAVIALTDPEGC |
| | PLSRFKDSLGNPTHILRIGESYKEKQRTIQAKKEVEQRRAGGYSRKYASKAK |
| | NLADDMVRNTARDLLYYAVTQDAMLIFENLSRGFGRQGKRTFMAERQYTRME |
| | DWLTAKLAYEGLSKTYLSKTLAQYTSKTCSNCGFTITSADYDRVLEKLKKTA |
| | TGWMTTINGKELKVEGQITYYNRYKRQNVVKDLSVELDRLSEESVNNDISSW |
| | TKGRSGEALSLLKKRFSHRPVQEKFVCLNCGFETHADEQAALNIARSWLFLR |
| | SQEYKKYQTNKTTGNTDKRAFVETWQSFYRKKLKEVWKPAV (SEQ ID |
| | NO: 120) |
| 286 | MQEIKRINKIRRRLVKDSNTKKAGKTGPMKTLLVRVMTPDLRERLENLRKKP |
| | ENIPQPISNTSRANLNKLLTDYTEMKKAILHVYWEEFQKDPVGLMSRVAQPA |
| | PKNIDQRKLIPVKDGNERLTSSGFACSQCCQPLYVYKLEQVNDKGKPHTNYF |
| | GRCNVSEHERLILLSPHKPEANDELVTYSLGKFGQRALDFYSIHVTRESNHP |
| | VKPLEQIGGNSCASGPVGKALSDACMGAVASFLTKYQDIIIEHQKVIKKNEK |
| | RLANLKDIASANGLAFPKITLPPQPHTKEGIEAYNNVVAQIVIWVNLNLWQK |
| | LKIGRDEAKPLQRLKGFPSFPLVERQANEVDWWDMVCNVKKLINEKKEDGKV |
| | FWQNLAGYKRQEALRPYLSSEEDRKKGKKFARYQFGDLLLHLEKKHGEDWGK |
| | VYDEAWERIDKKVEGLSKHIKLEEERRSEDAQSKAALTDWLRAKASFVIEGL |
| | KEADKDEFCRCELKLQKWYGDLRGKPFAIEAENSILDISGFSKQYNCAFIWQ |
| | KDGVKKLNLYLIINYFKGGKLRFKKIKPEAFEANRFYTVINKKSGEIVPMEV |
| | NFNFDDPNLIILPLAFGKRQGREFIWNDLLSLETGSLKLANGRVIEKTLYNR |
| | RTRQDEPALFVALTFERREVLDSSNIKPMNLIGIDRGENIPAVIALTDPEGC |
| | PLSRFKDSLGNPTHILRIGESYKEKQRTIQAKKEVEQRRAGGYSRKYASKAK |
| | NLADDMVRNTARDLLYYAVTQDAMLIFENLSRGFGRQGKRTFMAERQYTRME |
| | DWLTAKLAYEGLSKTYLSKTLAQYTSKTCSNCGFTITSADYDRVLEKLKKTA |
| | TGWMTTINGKELKVEGQITYYNRYKRQNVVKDLSVELDRLSEESVNNDISSW |
| | TKGRSGEALSLLKKRFSHRPVQEKFVCLNCGFETHADEQAALNIARSWLFLR |
| | SQEYKKYQTNKTTGNTDKRAFVETWQSFYRKKLKEVWKPAV (SEQ ID |
| | NO: 121) |
| 287 | MQEIKRINKIRRRLVKDSNTKKAGKTGPMKTLLVRVMTPDLRERLENLRKKP |
| | ENIPQPISNTSRANLNKLLTDYTEMKKAILHVYWEEFQKDPVGLMSRVAQPA |
| | PKNIDQRKLIPVKDGNERLTSSGFACSQCCQPLYVYKLEQVNDKGKPHTNYF |
| | GRCNVSEHERLILLSPHKPEANDELVTYSLGKFGQRALDFYSIHVTRESNHP |
| | VKPLEQIGGNSCASGPVGKALSDACMGAVASFLTKYQDIIIEHQKVIKKNEK |
| | RLANLKDIASANGLAFPKITLPPQPHTKEGIEAYNNVVAQIVIWVNLNLWQK |
| | LKIGRDEAKPLQRLKGFPSFPLVERQANEVDWWDMVCNVKKLINEKKEDGKV |
| | FWQNLAGYKRQEALRPYLSSEEDRKKGKKFARYQFGDLLLHLEKKHGEDWGK |
| | VYDEAWERIDKKVEGLSKHIKLEEERRSEDAQSKAALTDWLRAKASFVIEGL |
| | KEADKDEFCRCELKLQKWYGDLRGKPFAIEAENSILDISGFSKQYNCAFIWQ |
| | KDGVKKLNLYLIINYFKGGKLRFKKIKPEAFEANRFYTVINKKSGEIVPMEV |
| | NFNFDDPNLIILPLAFGKRQGREFIWNDLLSLETGSLKLANGRVIEKTLYNR |
| | RTRQDEPALFVALTFERREVLDSSNIKPMNLIGIDRGENIPAVIALTDPEGC |
| | PLSRFKDSLGNPTHILRIGESYKEKQRTIQAKKEVEQRRAGGYSRKYASKAK |
| | NLADDMVRNTARDLLYYAVTQDAMLIFENLSRGFGRQGKRTFMAERQYTRME |
| | DWLTAKLAYEGLSKTYLSKTLAQYTSKTCSNCGFTITSADYDRVLEKLKKTA |
| | TGWMTTINGKELKVEGQITYYNRYKRQNVVKDLSVELDRLSEESVNNDISSW |
| | TKGRSGEALSLLKKRFSHRPVQEKFVCLNCGFETHADEQAALNIARSWLFLR |
| | SQEYKKYQTNKTTGNTDKRAFVETWQSFYRKKLKEVWKPAV (SEQ ID |
| | NO: 122) |
| 288 | MQEIKRINKIRRRLVKDSNTKKAGKTGPMKTLLVRVMTPDLRERLENLRKKP |
| | ENIPQPISNTSRANLNKLLTDYTEMKKAILHVYWEEFQKDPVGLMSRVAQPA |
| | PKNIDQRKLIPVKDGNERLTMSSGFACSQCCQPLYVYKLEQVNDKGKPHTNY |
| | FGRCNVSEHERLILLSPHKPEANDELVTYSLGKFGQRALDFYSIHVTRESNH |
| | PVKPLEQIGGNSCASGPVGKALSDACMGAVASFLTKYQDIIIEHQKVIKKNE |
| | KRLANLKDIASANGLAFPKITLPPQPHTKEGIEAYNNVVAQIVIWVNLNLWQ |
| | KLKIGRDEAKPLQRLKGFPSFPLVERQANEVDWWDMVCNVKKLINEKKEDGK |
| | VFWQNLAGYKRQEALRPYLSSEEDRKKGKKFARYQFGDLLLHLEKKHGEDWG |
| | KVYDEAWERIDKKVEGLSKHIKLEEERRSEDAQSKAALTDWLRAKASFVIEG |
| | LKEADKDEFCRCELKLQKWYGDLRGKPFAIEAENSILDISGFSKQYNCAFIW |
| | QKDGVKKLNLYLIINYFKGGKLRFKKIKPEAFEANRFYTVINKKSGEIVPME |
| | VNFNFDDPNLIILPLAFGKRQGREFIWNDLLSLETGSLKLANGRVIEKTLYN |
| | RRTRQDEPALFVALTFERREVLDSSNIKPMNLIGIDRGENIPAVIALTDPEG |
| | CPLSRFKDSLGNPTHILRIGESYKEKQRTIQAKKEVEQRRAGGYSRKYASKA |
| | KNLADDMVRNTARDLLYYAVTQDAMLIFENLSRGFGRQGKRTFMAERQYTRM |
| | EDWLTAKLAYEGLSKTYLSKTLAQYTSKTCSNCGFTITSADYDRVLEKLKKT |
| | ATGWMTTINGKELKVEGQITYYNRYKRQNVVKDLSVELDRLSEESVNNDISS |
| | WTKGRSGEALSLLKKRFSHRPVQEKFVCLNCGFETHADEQAALNIARSWLFL |
| | RSQEYKKYQTNKTTGNTDKRAFVETWQSFYRKKLKEVWKPAV (SEQ ID |
| | NO: 123) |
| 290 | MQEIKRINKIRRRLVKDSNTKKAGKTGPMKTLLVRVMTPDLRERLENLRKKP |
| | ENIPQPISNTSRANLNKLLTDYTEMKKAILHVYWEEFQKDPVGLMSRVAQPA |
| | PKNIDQRKLIPVKDGNERLTSSGFACSQCCQPLYVYKLEQVNDKGKPHTNYF |
| | GRCNVSEHERLILLSPHKPEANDELVTYSLGKFGQRALDFYSIHVTRESNHP |
| | VKPLEQIGGNSCASGPVGKALSDACMGAVASFLTKYQDIIIEHQKVIKKNEK |
| | RLANLKDIASANGLAFPKITLPPQPHTKEGIEAYNNVVAQIVIWVNLNLWQK |
| | LKIGRDEAKPLQRLKGFPSFPLVERQANEVDWWDMVCNVKKLINEKKEDGKV |
| | FWQNLAGYKRQEALRPYLSSEEDRKKGKKFARYQFGDLLLHLEKKHGEDWGK |
| | VYDEAWERIDKKVEGLSKHIKLEEERRSEDAQSKAALTDWLRAKASFVIEGL |
| | KEADKDEFCRCELKLQKWYGDLRGKPFAIEAENSILDISGFSKQYNCAFIWQ |
| | KDGVKKLNLYLIINYFKGGKLRFKKIKPEAFEANRFYTVINKKSGEIVPMEV |
| | NFNFDDPNLIILPLAFGKRQGREFIWNDLLSLETGSLKLANGRVIEKTLYNR |
| | RTRQDEPALFVALTFERREVLDSSNIKPMNLIGIDRGENIPAVIALTDPEGC |
| | PLSRFKDSLGNPTHILRIGESYKEKQRTIQAKKEVEQRRAGGYSRKYASKAK |
| | NLADDMVRNTARDLLYYAVTQDAMLIFENLSRGFGRQGKRTFMAERQYTRME |
| | DWLTAKLAYEGLSKTYLSKTLAQYTSKTCSNCGFTITSADYDRVLEKLKKTA |
| | TGWMTTINGKELKVEGQITYYNRYKRQNVVKDLSVELDRLSEESVNNDISSW |
| | TKGRSGEALSLLKKRFSHRPVQEKFVCLNCGFETHADEQAALNIARSWLFLR |
| | SQEYKKYQTNKTTGNTDKRAFVETWQSFYRKKLKEVWKPAV (SEQ ID |
| | NO: 124) |
| 291 | MQEIKRINKIRRRLVKDSNTKKAGKTGPMKTLLVRVMTPDLRERLENLRKKP |
| | ENIPQPISNTSRANLNKLLTDYTEMKKAILHVYWEEFQKDPVGLMSRVAQPA |
| | PKNIDQRKLIPVKDGNERLTSSGFACSQCCQPLYVYKLEQVNDKGKPHTNYF |
| | GRCNVSEHERLILLSPHKPEANDELVTYSLGKFGQRALDFYSIHVTRESNHP |
| | VKPLEQIGGNSCASGPVGKALSDACMGAVASFLTKYQDIIIEHQKVIKKNEK |
| | RLANLKDIASANGLAFPKITLPPQPHTKEGIEAYNNVVAQIVIWVNLNLWQK |
| | LKIGRDEAKPLQRLKGFPSFPLVERQANEVDWWDMVCNVKKLINEKKEDGKV |
| | FWQNLAGYKRQEALRPYLSSEEDRKKGKKFARYQFGDLLLHLEKKHGEDWGK |
| | VYDEAWERIDKKVEGLSKHIKLEEERRSEDAQSKAALTDWLRAKASFVIEGL |
| | KEADKDEFCRCELKLQKWYGDLRGKPFAIEAENSILDISGFSKQYNCAFIWQ |
| | KDGVKKLNLYLIINYFKGGKLRFKKIKPEAFEANRFYTVINKKSGEIVPMEV |
| | NFNFDDPNLIILPLAFGKRQGREFIWNDLLSLETGSLKLANGRVIEKTLYNR |
| | RTRQDEPALFVALTFERREVLDSSNIKPMNLIGIDRGENIPAVIALTDPEGC |
| | PLSRFKDSLGNPTHILRIGESYKEKQRTIQAKKEVEQRRAGGYSRKYASKAK |
| | NLADDMVRNTARDLLYYAVTQDAMLIFENLSRGFGRQGKRTFMAERQYTRME |
| | DWLTAKLAYEGLSKTYLSKTLAQYTSKTCSNCGFTITSADYDRVLEKLKKTA |
| | TGWMTTINGKELKVEGQITYYNRYKRQNVVKDLSVELDRLSEESVNNDISSW |
| | TKGRSGEALSLLKKRFSHRPVQEKFVCLNCGFETHADEQAALNIARSWLFLR |
| | SQEYKKYQTNKTTGNTDKRAFVETWQSFYRKKLKEVWKPAV (SEQ ID |
| | NO: 125) |
| 293 | MQEIKRINKIRRRLVKDSNTKKAGKTGPMKTLLVRVMTPDLRERLENLRKKP |
| | ENIPQPISNTSRANLNKLLTDYTEMKKAILHVYWEEFQKDPVGLMSRVAQPA |
| | PKNIDQRKLIPVKDGNERLTSSGFACSQCCQPLYVYKLEQVNDKGKPHTNYF |
| | GRCNVSEHERLILLSPHKPEANDELVTYSLGKFGQRALDFYSIHVTRESNHP |
| | VKPLEQIGGNSCASGPVGKALSDACMGAVASFLTKYQDIIIEHQKVIKKNEK |
| | RLANLKDIASANGLAFPKITLPPQPHTKEGIEAYNNVVAQIVIWVNLNLWQK |
| | LKIGRDEAKPLQRLKGFPSFPLVERQANEVDWWDMVCNVKKLINEKKEDGKV |
| | FWQNLAGYKRQEALRPYLSSEEDRKKGKKFARYQFGDLLLHLEKKHGEDWGK |
| | VYDEAWERIDKKVEGLSKHIKLEEERRSEDAQSKAALTDWLRAKASFVIEGL |
| | KEADKDEFCRCELKLQKWYGDLRGKPFAIEAENSILDISGFSKQYNCAFIWQ |
| | KDGVKKLNLYLIINYFKGGKLRFKKIKPEAFEANRFYTVINKKSGEIVPMEV |
| | NFNFDDPNLIILPLAFGKRQGREFIWNDLLSLETGSLKLANGRVIEKTLYNR |
| | RTRQDEPALFVALTFERREVLDSSNIKPMNLIGIDRGENIPAVIALTDPEGC |
| | PLSRFKDSLGNPTHILRIGESYKEKQRTIQAKKEVEQRRAGGYSRKYASKAK |
| | NLADDMVRNTARDLLYYAVTQDAMLIFENLSRGFGRQGKRTFMAERQYTRME |
| | DWLTAKLAYEGLSKTYLSKTLAQYTSKTCSNCGFTITSADYDRVLEKLKKTA |
| | TGWMTTINGKELKVEGQITYYNRYKRQNVVKDLSVELDRLSEESVNNDISSW |
| | TKGRSGEALSLLKKRFSHRPVQEKFVCLNCGFETHADEQAALNIARSWLFLR |
| | SQEYKKYQTNKTTGNTDKRAFVETWQSFYRKKLKEVWKPAV (SEQ ID |
| | NO: 126) |
| 300 | MQEIKRINKIRRRLVKDSNTKKAGKTGPMKTLLVRVMTPDLRERLENLRKKP |
| | ENIPQPISNTSRANLNKLLTDYTEMKKAILHVYWEEFQKDPVGLMSRVAQPA |
| | PKNIDQRKLIPVKDGNERLTSSGFACSQCCQPLYVYKLEQVNDKGKPHTNYF |
| | GRCNVSEHERLILLSPHKPEANDELVTYSLGKFGQRALDFYSIHVTRESNHP |
| | VKPLEQIGGNSCASGPVGKALSDACMGAVASFLTKYQDIIIEHQKVIKKNEK |
| | RLANLKDIASANGLAFPKITLPPQPHTKEGIEAYNNVVAQIVIWVNLNLWQK |
| | LKIGRDEAKPLQRLKGFPSFPLVERQANEVDWWDMVCNVKKLINEKKEDGKV |
| | FWQNLAGYKRQEALRPYLSSEEDRKKGKKFARYQFGDLLLHLEKKHGEDWGK |
| | VYDEAWERIDKKVEGLSKHIKLEEERRSEDAQSKAALTDWLRAKASFVIEGL |
| | KEADKDEFCRCELKLQKWYGDLRGKPFAIEAENSILDISGFSKQYNCAFIWQ |
| | KDGVKKLNLYLIINYFKGGKLRFKKIKPEAFEANRFYTVINKKSGEIVPMEV |
| | NFNFDDPNLIILPLAFGKRQGREFIWNDLLSLETGSLKLANGRVIEKTLYNR |
| | RTRQDEPALFVALTFERREVLDSSNIKPMNLIGIDRGENIPAVIALTDPEGC |
| | PLSRFKDSLGNPTHILRIGESYKEKQRTIQAKKEVEQRRAGGYSRKYASKAK |
| | NLADDMVRNTARDLLYYAVTQDAMLIFENLSRGFGRQGKRTFMAERQYTRME |
| | DWLTAKLAYEGLSKTYLSKTLAQYTSKTCSNCGFTITSADYDRVLEKLKKTA |
| | TGWMTTINGKELKVEGQITYYNRYKRQNVVKDLSVELDRLSEESVNNDISSW |
| | TKGRSGEALSLLKKRFSHRPVQEKFVCLNCGFETHADEQAALNIARSWLFLR |
| | SQEYKKYQTNKTTGNTDKRAFVETWQSFYRKKLKEVWKPAV (SEQ ID |
| | NO: 127) |
| 492 | MQEIKRINKIRRRLVKDSNTKKAGKTGPMKTLLVRVMTPDLRERLENLRKKP |
| | ENIPQPISNTSRANLNKLLTDYTEMKKAILHVYWEEFQKDPVGLMSRVAQPA |
| | PKNIDQRKLIPVKDGNERLTSSGFACSQCCQPLYVYKLEQVNDKGKPHTNYF |
| | GRCNVSEHERLILLSPHKPEANDELVTYSLGKFGQRALDFYSIHVTRESNHP |
| | VKPLEQIGGNSCASGPVGKALSDACMGAVASFLTKYQDIIIEHQKVIKKNEK |
| | RLANLKDIASANGLAFPKITLPPQPHTKEGIEAYNNVVAQIVIWVNLNLWQK |
| | LKIGRDEAKPLQRLKGFPSFPLVERQANEVDWWDMVCNVKKLINEKKEDGKV |
| | FWQNLAGYKRQEALRPYLSSEEDRKKGKKFARYQFGDLLLHLEKKHGEDWGK |
| | VYDEAWERIDKKVEGLSKHIKLEEERRSEDAQSKAALTDWLRAKASFVIEGL |
| | KEADKDEFCRCELKLQKWYGDLRGKPFAIEAENSILDISGFSKQYNCAFIWQ |
| | KDGVKKLNLYLIINYFKGGKLRFKKIKPEAFEANRFYTVINKKSGEIVPMEV |
| | NFNFDDPNLIILPLAFGKRQGREFIWNDLLSLETGSLKLANGRVIEKTLYNR |
| | RTRQDEPALFVALTFERREVLDSSNIKPMNLIGIDRGENIPAVIALTDPEGC |
| | PLSRFKDSLGNPTHILRIGESYKEKQRTIQAKKEVEQRRAGGYSRKYASKAK |
| | NLADDMVRNTARDLLYYAVTQDAMLIFENLSRGFGRQGKRTFMAERQYTRME |
| | DWLTAKLAYEGLSKTYLSKTLAQYTSKTCSNCGFTITSADYDRVLEKLKKTA |
| | TGWMTTINGKELKVEGQITYYNRYKRQNVVKDLSVELDRLSEESVNNDISSW |
| | TKGRSGEALSLLKKRFSHRPVQEKFVCLNCGFETHADEQAALNIARSWLFLR |
| | SQEYKKYQTNKTTGNTDKRAFVETWQSFYRKKLKEVWKPAV (SEQ ID |
| | NO: 128) |
| 493 | MQEIKRINKIRRRLVKDSNTKKAGKTGPMKTLLVRVMTPDLRERLENLRKKP |
| | ENIPQPISNTSRANLNKLLTDYTEMKKAILHVYWEEFQKDPVGLMSRVAQPA |
| | PKNIDQRKLIPVKDGNERLTSSGFACSQCCQPLYVYKLEQVNDKGKPHTNYF |
| | GRCNVSEHERLILLSPHKPEANDELVTYSLGKFGQRALDFYSIHVTRESNHP |
| | VKPLEQIGGNSCASGPVGKALSDACMGAVASFLTKYQDIIIEHQKVIKKNEK |
| | RLANLKDIASANGLAFPKITLPPQPHTKEGIEAYNNVVAQIVIWVNLNLWQK |
| | LKIGRDEAKPLQRLKGFPSFPLVERQANEVDWWDMVCNVKKLINEKKEDGKV |
| | FWQNLAGYKRQEALRPYLSSEEDRKKGKKFARYQFGDLLLHLEKKHGEDWGK |
| | VYDEAWERIDKKVEGLSKHIKLEEERRSEDAQSKAALTDWLRAKASFVIEGL |
| | KEADKDEFCRCELKLQKWYGDLRGKPFAIEAENSILDISGFSKQYNCAFIWQ |
| | KDGVKKLNLYLIINYFKGGKLRFKKIKPEAFEANRFYTVINKKSGEIVPMEV |
| | NFNFDDPNLIILPLAFGKRQGREFIWNDLLSLETGSLKLANGRVIEKTLYNR |
| | RTRQDEPALFVALTFERREVLDSSNIKPMNLIGIDRGENIPAVIALTDPEGC |
| | PLSRFKDSLGNPTHILRIGESYKEKQRTIQAKKEVEQRRAGGYSRKYASKAK |
| | NLADDMVRNTARDLLYYAVTQDAMLIFENLSRGFGRQGKRTFMAERQYTRME |
| | DWLTAKLAYEGLSKTYLSKTLAQYTSKTCSNCGFTITSADYDRVLEKLKKTA |
| | TGWMTTINGKELKVEGQITYYNRYKRQNVVKDLSVELDRLSEESVNNDISSW |
| | TKGRSGEALSLLKKRFSHRPVQEKFVCLNCGFETHADEQAALNIARSWLFLR |
| | SQEYKKYQTNKTTGNTDKRAFVETWQSFYRKKLKEVWKPAV (SEQ ID |
| | NO: 129) |
| 387: | QEIKRINKIRRRLVKDSNTKKAGKTGPMKTLLVRVMTPDLRERLENLRKKPE |
| NT SB swap | NIPQPISNTSRANLNKLLTDYTEMKKAILHVYWEEFQKDPVGLMSRVAQPAS |
| from SEQ ID | KKIDQNKLKPEMDEKGNLTTAGFACSQCGQPLFVYKLEQVSEKGKAYTNYFG |
| NO: 1 | RCNVAEHEKLILLAQLKPEKDSDEAVTYSLGKFGQRALDFYSIHVTRESNHP |
| | VKPLEQIGGNSCASGPVGKALSDACMGAVASFLTKYQDIIIEHQKVIKKNEK |
| | RLANLKDIASANGLAFPKITLPPQPHTKEGIEAYNNVVAQIVIWVNLNLWQK |
| | LKIGRDEAKPLQRLKGFPSFPLVERQANEVDWWDMVCNVKKLINEKKEDGKV |
| | FWQNLAGYKRQEALRPYLSSEEDRKKGKKFARYQFGDLLLHLEKKHGEDWGK |
| | VYDEAWERIDKKVEGLSKHIKLEEERRSEDAQSKAALTDWLRAKASFVIEGL |
| | KEADKDEFCRCELKLQKWYGDLRGKPFAIEAENSILDISGFSKQYNCAFIWQ |
| | KDGVKKLNLYLIINYFKGGKLRFKKIKPEAFEANRFYTVINKKSGEIVPMEV |
| | NFNFDDPNLIILPLAFGKRQGREFIWNDLLSLETGSLKLANGRVIEKTLYNR |
| | RTRQDEPALFVALTFERREVLDSSNIKPMNLIGIDRGENIPAVIALTDPEGC |
| | PLSRFKDSLGNPTHILRIGESYKEKQRTIQAKKEVEQRRAGGYSRKYASKAK |
| | NLADDMVRNTARDLLYYAVTQDAMLIFENLSRGFGRQGKRTFMAERQYTRME |
| | DWLTAKLAYEGLSKTYLSKTLAQYTSKTCSNCGFTITSADYDRVLEKLKKTA |
| | TGWMTTINGKELKVEGQITYYNRYKRQNVVKDLSVELDRLSEESVNNDISSW |
| | TKGRSGEALSLLKKRFSHRPVQEKFVCLNCGFETHADEQAALNIARSWLFLR |
| | SQEYKKYQTNKTTGNTDKRAFVETWQSFYRKKLKEVWKPAV (SEQ ID |
| | NO: 130) |
| 395: | QEIKRINKIRRRLVKDSNTKKAGKTGPMKTLLVRVMTPDLRERLENLRKKPE |
| Helical 1B | NIPQPISNTSRANLNKLLTDYTEMKKAILHVYWEEFQKDPVGLMSRVAQPAP |
| swap from | KNIDQRKLIPVKDGNERLTSSGFACSQCCQPLYVYKLEQVNDKGKPHTNYFG |
| SEQ ID | RCNVSEHERLILLSPHKPEANDELVTYSLGKFGQRALDFYSIHVTKESTHPV |
| NO: 1 | KPLAQIAGNRYASGPVGKALSDACMGTIASFLSKYQDIIIEHQKVVKGNQKR |
| | LESLRELAGKENLEYPSVTLPPQPHTKEGVDAYNEVIARVRMWVNLNLWQKL |
| | KLSRDDAKPLLRLKGFPSFPLVERQANEVDWWDMVCNVKKLINEKKEDGKVF |
| | WQNLAGYKRQEALRPYLSSEEDRKKGKKFARYQFGDLLLHLEKKHGEDWGKV |
| | YDEAWERIDKKVEGLSKHIKLEEERRSEDAQSKAALTDWLRAKASFVIEGLK |
| | EADKDEFCRCELKLQKWYGDLRGKPFAIEAENSILDISGFSKQYNCAFIWQK |
| | DGVKKLNLYLIINYFKGGKLRFKKIKPEAFEANRFYTVINKKSGEIVPMEVN |
| | FNFDDPNLIILPLAFGKRQGREFIWNDLLSLETGSLKLANGRVIEKTLYNRR |
| | TRQDEPALFVALTFERREVLDSSNIKPMNLIGIDRGENIPAVIALTDPEGCP |
| | LSRFKDSLGNPTHILRIGESYKEKQRTIQAKKEVEQRRAGGYSRKYASKAKN |
| | LADDMVRNTARDLLYYAVTQDAMLIFENLSRGFGRQGKRTFMAERQYTRMED |
| | WLTAKLAYEGLSKTYLSKTLAQYTSKTCSNCGFTITSADYDRVLEKLKKTAT |
| | GWMTTINGKELKVEGQITYYNRYKRQNVVKDLSVELDRLSEESVNNDISSWT |
| | KGRSGEALSLLKKRFSHRPVQEKFVCLNCGFETHADEQAALNIARSWLFLRS |
| | QEYKKYQTNKTTGNTDKRAFVETWQSFYRKKLKEVWKPAV (SEQ ID NO: |
| | 131) |
| 485: | QEIKRINKIRRRLVKDSNTKKAGKTGPMKTLLVRVMTPDLRERLENLRKKPE |
| Helical 1B | NIPQPISNTSRANLNKLLTDYTEMKKAILHVYWEEFQKDPVGLMSRVAQPAP |
| swap from | KNIDQRKLIPVKDGNERLTSSGFACSQCCQPLYVYKLEQVNDKGKPHTNYFG |
| SEQ ID | RCNVSEHERLILLSPHKPEANDELVTYSLGKFGQRALDFYSIHVTKESTHPV |
| NO: 1 | KPLAQIAGNRYASGPVGKALSDACMGTIASFLSKYQDIIIEHQKVVKGNQKR |
| | LESLRELAGKENLEYPSVTLPPQPHTKEGVDAYNEVIARVRMWVNLNLWQKL |
| | KLSRDDAKPLLRLKGFPSFPLVERQANEVDWWDMVCNVKKLINEKKEDGKVF |
| | WQNLAGYKRQEALRPYLSSEEDRKKGKKFARYQLGDLLLHLEKKHGEDWGKV |
| | YDEAWERIDKKVEGLSKHIKLEEERRSEDAQSKAALTDWLRAKASFVIEGLK |
| | EADKDEFCRCELKLQKWYGDLRGKPFAIEAENSILDISGFSKQYNCAFIWQK |
| | DGVKKLNLYLIINYFKGGKLRFKKIKPEAFEANRFYTVINKKSGEIVPMEVN |
| | FNFDDPNLIILPLAFGKRQGREFIWNDLLSLETGSLKLANGRVIEKTLYNRR |
| | TRQDEPALFVALTFERREVLDSSNIKPMNLIGVDRGENIPAVIALTDPEGCP |
| | LSRFKDSLGNPTHILRIGESYKEKQRTIQAKKEVEQRRAGGYSRKYASKAKN |
| | LADDMVRNTARDLLYYAVTQDAMLIFENLSRGFGRQGKRTFMAERQYTRMED |
| | WLTAKLAYEGLSKTYLSKTLAQYTSKTCSNCGFTITSADYDRVLEKLKKTAT |
| | GWMTTINGKELKVEGQITYYNRRKRQNVVKDLSVELDRLSEESVNNDISSWT |
| | KGRSGEALSLLKKRFSHRPVQEKFVCLNCGFETHADEQAALNIARSWLFLRS |
| | QEYKKYQTNKTTGNTDKRAFVETWQSFYRKKLKEVWKPAV (SEQ ID NO: |
| | 132) |
| 486: | QEIKRINKIRRRLVKDSNTKKAGKTGPMKTLLVRVMTPDLRERLENLRKKPE |
| Helical 1B | NIPQPISNTSRANLNKLLTDYTEMKKAILHVYWEEFQKDPVGLMSRVAQPAP |
| swap from | KNIDQRKLIPVKDGNERLTSSGFACSQCCQPLYVYKLEQVNDKGKPHTNYFG |
| SEQ ID | RCNVSEHERLILLSPHKPEANDELVTYSLGKFGQRALDFYSIHVTKESTHPV |
| NO: 1 | KPLAQIAGNRYASGPVGKALSDACMGTIASFLSKYQDIIIEHQKVVKGNQKR |
| | LESLRELAGKENLEYPSVTLPPQPHTKEGVDAYNEVIARVRMWVNLNLWQKL |
| | KLSRDDAKPLLRLKGFPSFPLVERQANEVDWWDMVCNVKKLINEKKEDGKVF |
| | WQNLAGYKRQEALRPYLSSEEDRKKGKKFARYQLGDLLKHLEKKHGEDWGKV |
| | YDEAWERIDKKVEGLSKHIKLEEERRSEDAQSKAALTDWLRAKASFVIEGLK |
| | EADKDEFCRCELKLQKWYGDLRGKPFAIEAENSILDISGFSKQYNCAFIWQK |
| | DGVKKLNLYLIINYFKGGKLRFKKIKPEAFEANRFYTVINKKSGEIVPMEVN |
| | FNFDDPNLIILPLAFGKRQGREFIWNDLLSLETGSLKLANGRVIEKTLYNRR |
| | TRQDEPALFVALTFERREVLDSSNIKPMNLIGVDRGENIPAVIALTDPEGCP |
| | LSRFKDSLGNPTHILRIGESYKEKQRTIQAKKEVEQRRAGGYSRKYASKAKN |
| | LADDMVRNTARDLLYYAVTQDAMLIFENLSRGFGRQGKRTFMAERQYTRMED |
| | WLTAKLAYEGLSKTYLSKTLAQYTSKTCSNCGFTITSADYDRVLEKLKKTAT |
| | GWMTTINGKELKVEGQITYYNRRKRQNVVKDLSVELDRLSEESVNNDISSWT |
| | KGRSGEALSLLKKRFSHRPVQEKFVCLNCGFETHADEQAALNIARSWLFLRS |
| | QEYKKYQTNKTTGNTDKRAFVETWQSFYRKKLKEVWKPAV (SEQ ID NO: |
| | 133) |
| 487: | QEIKRINKIRRRLVKDSNTKKAGKTGPMKTLLVRVMTPDLRERLENLRKKPE |
| Helical 1B | NIPQPISNTSRANLNKLLTDYTEMKKAILHVYWEEFQKDPVGLMSRVAQPAP |
| swap from | KNIDQRKLIPVKDGNERLTSSGFACSQCCQPLYVYKLEQVNDKGKPHTNYFG |
| SEQ ID | RCNVSEHERLILLSPHKPEANDELVTYSLGKFGQRALDFYSIHVTKESTHPV |
| NO: 1 | KPLAQIAGNRYASGPVGKALSDACMGTIASFLSKYQDIIIEHQKVVKGNQKR |
| | LESLRELAGKENLEYPSVTLPPQPHTKEGVDAYNEVIARVRMWVNLNLWQKL |
| | KLSRDDAKPLLRLKGFPSFPLVERQANEVDWWDMVCNVKKLINEKKEDGKVF |
| | WQNLAGYKRQEALRPYLSSEEDRKKGKKFARYQLGDLLLHLEKKHGEDWGKV |
| | YDEAWERIDKKVEGLSKHIKLEEERRSEDAQSKAALTDWLRAKASFVIEGLK |
| | EADKDEFCRCELKLQKWYGDLRGKPFAIEAENSILDISGFSKQYNCAFIWQK |
| | DGVKKLNLYLIINYFKGGKLRFKKIKPEAFEANRFYTVINKKSGEIVPMEVN |
| | FNFDDPNLIILPLAFGKRQGREFIWNDLLSLETGSLKLANGRVIEKTLYNRR |
| | TRQDEPALFVALTFERREVLDSSNIKPMNLIGVDRGENIPAVIALTDPEGCP |
| | LSRFKDSLGNPTHILRIGESYKEKQRTIQAKKEVEQRRAGGYSRKYASKAKN |
| | LADDMVRNTARDLLYYAVTQDAMLIFENLSRGFGRQGKRTFMAERQYTRMED |
| | WLTAKLAYEGLSKTYLSKTLAQYTSKTCSNCGFTITSADYDRVLEKLKKTAT |
| | GWMTTINGKELKVEGQITYYNRYKRQNVVKDLSVELDRLSEESVNNDISSWT |
| | KGRSGEALSLLKKRFSHRPVQEKFVCLNCGFETHADEQAALNIARSWLFLRS |
| | QEYKKYQTNKTTGNTDKRAFVETWQSFYRKKLKEVWKPAV (SEQ ID NO: |
| | 134) |
| 488: | QEIKRINKIRRRLVKDSNTKKAGKTGPMKTLLVRVMTPDLRERLENLRKKPE |
| NTSB and | NIPQPISNTSRANLNKLLTDYTEMKKAILHVYWEEFQKDPVGLMSRVAQPAS |
| Helical 1B | KKIDQNKLKPEMDEKGNLTTAGFACSQCGQPLFVYKLEQVSEKGKAYTNYFG |
| swap from | RCNVAEHEKLILLAQLKPEKDSDEAVTYSLGKFGQRALDFYSIHVTKESTHP |
| SEQ ID | VKPLAQIAGNRYASGPVGKALSDACMGTIASFLSKYQDIIIEHQKVVKGNQK |
| NO: 1 | RLESLRELAGKENLEYPSVTLPPQPHTKEGVDAYNEVIARVRMWVNLNLWQK |
| | LKLSRDDAKPLLRLKGFPSFPLVERQANEVDWWDMVCNVKKLINEKKEDGKV |
| | FWQNLAGYKRQEALRPYLSSEEDRKKGKKFARYQFGDLLLHLEKKHGEDWGK |
| | VYDEAWERIDKKVEGLSKHIKLEEERRSEDAQSKAALTDWLRAKASFVIEGL |
| | KEADKDEFCRCELKLQKWYGDLRGKPFAIEAENSILDISGFSKQYNCAFIWQ |
| | KDGVKKLNLYLIINYFKGGKLRFKKIKPEAFEANRFYTVINKKSGEIVPMEV |
| | NFNFDDPNLIILPLAFGKRQGREFIWNDLLSLETGSLKLANGRVIEKTLYNR |
| | RTRQDEPALFVALTFERREVLDSSNIKPMNLIGIDRGENIPAVIALTDPEGC |
| | PLSRFKDSLGNPTHILRIGESYKEKQRTIQAKKEVEQRRAGGYSRKYASKAK |
| | NLADDMVRNTARDLLYYAVTQDAMLIFENLSRGFGRQGKRTFMAERQYTRME |
| | DWLTAKLAYEGLSKTYLSKTLAQYTSKTCSNCGFTITSADYDRVLEKLKKTA |
| | TGWMTTINGKELKVEGQITYYNRYKRQNVVKDLSVELDRLSEESVNNDISSW |
| | TKGRSGEALSLLKKRFSHRPVQEKFVCLNCGFETHADEQAALNIARSWLFLR |
| | SQEYKKYQTNKTTGNTDKRAFVETWQSFYRKKLKEVWKPAV (SEQ ID |
| | NO: 135) |
| 489: | QEIKRINKIRRRLVKDSNTKKAGKTGPMKTLLVRVMTPDLRERLENLRKKPE |
| NTSB and | NIPQPISNTSRANLNKLLTDYTEMKKAILHVYWEEFQKDPVGLMSRVAQPAS |
| Helical 1B | KKIDQNKLKPEMDEKGNLTTAGFACSQCGQPLFVYKLEQVSEKGKAYTNYFG |
| swap from | RCNVAEHEKLILLAQLKPEKDSDEAVTYSLGKFGQRALDFYSIHVTKESTHP |
| SEQ ID | VKPLAQIAGNRYASGPVGKALSDACMGTIASFLSKYQDIIIEHQKVVKGNQK |
| NO: 1 | RLESLRELAGKENLEYPSVTLPPQPHTKEGVDAYNEVIARVRMWVNLNLWQK |
| | LKLSRDDAKPLLRLKGFPSFPLVERQANEVDWWDMVCNVKKLINEKKEDGKV |
| | FWQNLAGYKRQEALRPYLSSEEDRKKGKKFARYQLGDLLLHLEKKHGEDWGK |
| | VYDEAWERIDKKVEGLSKHIKLEEERRSEDAQSKAALTDWLRAKASFVIEGL |
| | KEADKDEFCRCELKLQKWYGDLRGKPFAIEAENSILDISGFSKQYNCAFIWQ |
| | KDGVKKLNLYLIINYFKGGKLRFKKIKPEAFEANRFYTVINKKSGEIVPMEV |
| | NFNFDDPNLIILPLAFGKRQGREFIWNDLLSLETGSLKLANGRVIEKTLYNR |
| | RTRQDEPALFVALTFERREVLDSSNIKPMNLIGVDRGENIPAVIALTDPEGC |
| | PLSRFKDSLGNPTHILRIGESYKEKQRTIQAKKEVEQRRAGGYSRKYASKAK |
| | NLADDMVRNTARDLLYYAVTQDAMLIFENLSRGFGRQGKRTFMAERQYTRME |
| | DWLTAKLAYEGLSKTYLSKTLAQYTSKTCSNCGFTITSADYDRVLEKLKKTA |
| | TGWMTTINGKELKVEGQITYYNRRKRQNVVKDLSVELDRLSEESVNNDISSW |
| | TKGRSGEALSLLKKRFSHRPVQEKFVCLNCGFETHADEQAALNIARSWLFLR |
| | SQEYKKYQTNKTTGNTDKRAFVETWQSFYRKKLKEVWKPAV (SEQ ID |
| | NO: 136) |
| 490: | QEIKRINKIRRRLVKDSNTKKAGKTGPMKTLLVRVMTPDLRERLENLRKKPE |
| NTSB and | NIPQPISNTSRANLNKLLTDYTEMKKAILHVYWEEFQKDPVGLMSRVAQPAS |
| Helical 1B | KKIDQNKLKPEMDEKGNLTTAGFACSQCGQPLFVYKLEQVSEKGKAYTNYFG |
| swap from | RCNVAEHEKLILLAQLKPEKDSDEAVTYSLGKFGQRALDFYSIHVTKESTHP |
| SEQ ID | VKPLAQIAGNRYASGPVGKALSDACMGTIASFLSKYQDIIIEHQKVVKGNQK |
| NO: 1 | RLESLRELAGKENLEYPSVTLPPQPHTKEGVDAYNEVIARVRMWVNLNLWQK |
| | LKLSRDDAKPLLRLKGFPSFPLVERQANEVDWWDMVCNVKKLINEKKEDGKV |
| | FWQNLAGYKRQEALRPYLSSEEDRKKGKKFARYQLGDLLKHLEKKHGEDWGK |
| | VYDEAWERIDKKVEGLSKHIKLEEERRSEDAQSKAALTDWLRAKASFVIEGL |
| | KEADKDEFCRCELKLQKWYGDLRGKPFAIEAENSILDISGFSKQYNCAFIWQ |
| | KDGVKKLNLYLIINYFKGGKLRFKKIKPEAFEANRFYTVINKKSGEIVPMEV |
| | NFNFDDPNLIILPLAFGKRQGREFIWNDLLSLETGSLKLANGRVIEKTLYNR |
| | RTRQDEPALFVALTFERREVLDSSNIKPMNLIGVDRGENIPAVIALTDPEGC |
| | PLSRFKDSLGNPTHILRIGESYKEKQRTIQAKKEVEQRRAGGYSRKYASKAK |
| | NLADDMVRNTARDLLYYAVTQDAMLIFENLSRGFGRQGKRTFMAERQYTRME |
| | DWLTAKLAYEGLSKTYLSKTLAQYTSKTCSNCGFTITSADYDRVLEKLKKTA |
| | TGWMTTINGKELKVEGQITYYNRRKRQNVVKDLSVELDRLSEESVNNDISSW |
| | TKGRSGEALSLLKKRFSHRPVQEKFVCLNCGFETHADEQAALNIARSWLFLR |
| | SQEYKKYQTNKTTGNTDKRAFVETWQSFYRKKLKEVWKPAV (SEQ ID |
| | NO: 137) |
| 491: | QEIKRINKIRRRLVKDSNTKKAGKTGPMKTLLVRVMTPDLRERLENLRKKPE |
| NTSB and | NIPQPISNTSRANLNKLLTDYTEMKKAILHVYWEEFQKDPVGLMSRVAQPAS |
| Helical 1B | KKIDQNKLKPEMDEKGNLTTAGFACSQCGQPLFVYKLEQVSEKGKAYTNYFG |
| swap from | RCNVAEHEKLILLAQLKPEKDSDEAVTYSLGKFGQRALDFYSIHVTKESTHP |
| SEQ ID | VKPLAQIAGNRYASGPVGKALSDACMGTIASFLSKYQDIIIEHQKVVKGNQK |
| NO: 1 | RLESLRELAGKENLEYPSVTLPPQPHTKEGVDAYNEVIARVRMWVNLNLWQK |
| | LKLSRDDAKPLLRLKGFPSFPLVERQANEVDWWDMVCNVKKLINEKKEDGKV |
| | FWQNLAGYKRQEALRPYLSSEEDRKKGKKFARYQLGDLLLHLEKKHGEDWGK |
| | VYDEAWERIDKKVEGLSKHIKLEEERRSEDAQSKAALTDWLRAKASFVIEGL |
| | KEADKDEFCRCELKLQKWYGDLRGKPFAIEAENSILDISGFSKQYNCAFIWQ |
| | KDGVKKLNLYLIINYFKGGKLRFKKIKPEAFEANRFYTVINKKSGEIVPMEV |
| | NFNFDDPNLIILPLAFGKRQGREFIWNDLLSLETGSLKLANGRVIEKTLYNR |
| | RTRQDEPALFVALTFERREVLDSSNIKPMNLIGVDRGENIPAVIALTDPEGC |
| | PLSRFKDSLGNPTHILRIGESYKEKQRTIQAKKEVEQRRAGGYSRKYASKAK |
| | NLADDMVRNTARDLLYYAVTQDAMLIFENLSRGFGRQGKRTFMAERQYTRME |
| | DWLTAKLAYEGLSKTYLSKTLAQYTSKTCSNCGFTITSADYDRVLEKLKKTA |
| | TGWMTTINGKELKVEGQITYYNRYKRQNVVKDLSVELDRLSEESVNNDISSW |
| | TKGRSGEALSLLKKRFSHRPVQEKFVCLNCGFETHADEQAALNIARSWLFLR |
| | SQEYKKYQTNKTTGNTDKRAFVETWQSFYRKKLKEVWKPAV (SEQ ID |
| | NO: 138) |
| 494: | QEIKRINKIRRRLVKDSNTKKAGKTGPMKTLLVRVMTPDLRERLENLRKKPE |
| NTSB swap | NIPQPISNTSRANLNKLLTDYTEMKKAILHVYWEEFQKDPVGLMSRVAQPAS |
| from SEQ ID | KKIDQNKLKPEMDEKGNLTTAGFACSQCGQPLFVYKLEQVSEKGKAYTNYFG |
| NO: 1 | RCNVAEHEKLILLAQLKPEKDSDEAVTYSLGKFGQRALDFYSIHVTRESNHP |
| | VKPLEQIGGNSCASGPVGKALSDACMGAVASFLTKYQDIIIEHQKVIKKNEK |
| | RLANLKDIASANGLAFPKITLPPQPHTKEGIEAYNNVVAQIVIWVNLNLWQK |
| | LKIGRDEAKPLQRLKGFPSFPLVERQANEVDWWDMVCNVKKLINEKKEDGKV |
| | FWQNLAGYKRQEALRPYLSSEEDRKKGKKFARYQLGDLLLHLEKKHGEDWGK |
| | VYDEAWERIDKKVEGLSKHIKLEEERRSEDAQSKAALTDWLRAKASFVIEGL |
| | KEADKDEFCRCELKLQKWYGDLRGKPFAIEAENSILDISGFSKQYNCAFIWQ |
| | KDGVKKLNLYLIINYFKGGKLRFKKIKPEAFEANRFYTVINKKSGEIVPMEV |
| | NFNFDDPNLIILPLAFGKRQGREFIWNDLLSLETGSLKLANGRVIEKTLYNR |
| | RTRQDEPALFVALTFERREVLDSSNIKPMNLIGVDRGENIPAVIALTDPEGC |
| | PLSRFKDSLGNPTHILRIGESYKEKQRTIQAKKEVEQRRAGGYSRKYASKAK |
| | NLADDMVRNTARDLLYYAVTQDAMLIFENLSRGFGRQGKRTFMAERQYTRME |
| | DWLTAKLAYEGLSKTYLSKTLAQYTSKTCSNCGFTITSADYDRVLEKLKKTA |
| | TGWMTTINGKELKVEGQITYYNRYKRQNVVKDLSVELDRLSEESVNNDISSW |
| | TKGRSGEALSLLKKRFSHRPVQEKFVCLNCGFETHADEQAALNIARSWLFLR |
| | SQEYKKYQTNKTTGNTDKRAFVETWQSFYRKKLKEVWKPAV (SEQ ID |
| | NO: 139) |
| 328: S867G | MQEIKRINKIRRRLVKDSNTKKAGKTGPMKTLLVRVMTPDLRERLENLRKKP |
| | ENIPQPISNTSRANLNKLLTDYTEMKKAILHVYWEEFQKDPVGLMSRVAQPA |
| | PKNIDQRKLIPVKDGNERLTSSGFACSQCCQPLYVYKLEQVNDKGKPHTNYF |
| | GRCNVSEHERLILLSPHKPEANDELVTYSLGKFGQRALDFYSIHVTRESNHP |
| | VKPLEQIGGNSCASGPVGKALSDACMGAVASFLTKYQDIIIEHQKVIKKNEK |
| | RLANLKDIASANGLAFPKITLPPQPHTKEGIEAYNNVVAQIVIWVNLNLWQK |
| | LKIGRDEAKPLQRLKGFPSFPLVERQANEVDWWDMVCNVKKLINEKKEDGKV |
| | FWQNLAGYKRQEALLPYLSSEEDRKKGKKFARYQFGDLLLHLEKKHGEDWGK |
| | VYDEAWERIDKKVEGLSKHIKLEEERRSEDAQSKAALTDWLRAKASFVIEGL |
| | KEADKDEFCRCELKLQKWYGDLRGKPFAIEAENSILDISGFSKQYNCAFIWQ |
| | KDGVKKLNLYLIINYFKGGKLRFKKIKPEAFEANRFYTVINKKSGEIVPMEV |
| | NFNFDDPNLIILPLAFGKRQGREFIWNDLLSLETGSLKLANGRVIEKTLYNR |
| | RTRQDEPALFVALTFERREVLDSSNIKPMNLIGIDRGENIPAVIALTDPEGC |
| | PLSRFKDSLGNPTHILRIGESYKEKQRTIQAAKEVEQRRAGGYSRKYASKAK |
| | NLADDMVRNTARDLLYYAVTQDAMLIFENLSRGFGRQGKRTFMAERQYTRME |
| | DWLTAKLAYEGLPSKTYLSKTLAQYTSKTCSNCGFTITSADYDRVLEKLKKT |
| | ATGWMTTINGKELKVEGQITYYNRYKRQNVVKDLGVELDRLSEESVNNDISS |
| | WTKGRSGEALSLLKKRFSHRPVQEKFVCLNCGFETHADEQAALNIARSWLFL |
| | RSQEYKKYQTNKTTGNTDKRAFVETWQSFYRKKLKEVWKPAV (SEQ ID |
| | NO: 140) |
| 388: | MQEIKRINKIRRRLVKDSNTKKAGKTGPMKTLLVRVMTPDLRERLENLRKKP |
| L379R + A70 | ENIPQPISNTSRANLNKLLTDYTEMKKAILHVYWEEFQKDPVGLMSRVAQPA |
| 8K [P793] | PKNIDQRKLIPVKDGNERLTSSGFACSQCCQPLYVYKLEQVNDKGKPHTNYF |
| + X1 | GRCNVSEHERLILLSPHKPEANDELVTYSLGKFGQRALDFYSIHVTRESNHP |
| Helical2 | VKPLEQIGGNSCASGPVGKALSDACMGAVASFLTKYQDIIIEHQKVIKKNEK |
| swap | RLANLKDIASANGLAFPKITLPPQPHTKEGIEAYNNVVAQIVIWVNLNLWQK |
| | LKIGRDEAKPLQRLKGFPSFPVVERRENEVDWWNTINEVKKLIDAKRDMGRV |
| | FWSGVTAEKRNTILEGYNYLPNENDHKKREGSLENPKKPAKRQFGDLLLYLE |
| | KKYAGDWGKVFDEAWERIDKKIAGLTSHIEREEARNAEDAQSKAVLTDWLRA |
| | KASFVLERLKEMDEKEFYACEIQLQKWYGDLRGNPFAVEAENSILDISGFSK |
| | QYNCAFIWQKDGVKKLNLYLIINYFKGGKLRFKKIKPEAFEANRFYTVINKK |
| | SGEIVPMEVNFNFDDPNLIILPLAFGKRQGREFIWNDLLSLETGSLKLANGR |
| | VIEKTLYNRRTRQDEPALFVALTFERREVLDSSNIKPMNLIGIDRGENIPAV |
| | IALTDPEGCPLSRFKDSLGNPTHILRIGESYKEKQRTIQAKKEVEQRRAGGY |
| | SRKYASKAKNLADDMVRNTARDLLYYAVTQDAMLIFENLSRGFGRQGKRTFM |
| | AERQYTRMEDWLTAKLAYEGLSKTYLSKTLAQYTSKTCSNCGFTITSADYDR |
| | VLEKLKKTATGWMTTINGKELKVEGQITYYNRYKRQNVVKDLSVELDRLSEE |
| | SVNNDISSWTKGRSGEALSLLKKRFSHRPVQEKFVCLNCGFETHADEQAALN |
| | IARSWLFLRSQEYKKYQTNKTTGNTDKRAFVETWQSFYRKKLKEVWKPAV |
| | (SEQ ID NO: 141) |
| 389: | MQEIKRINKIRRRLVKDSNTKKAGKTGPMKTLLVRVMTPDLRERLENLRKKP |
| L379R + A70 | ENIPQPISNTSRANLNKLLTDYTEMKKAILHVYWEEFQKDPVGLMSRVAQPA |
| 8K [P793] | PKNIDQRKLIPVKDGNERLTSSGFACSQCCQPLYVYKLEQVNDKGKPHTNYF |
| + X1 RuvC1 | GRCNVSEHERLILLSPHKPEANDELVTYSLGKFGQRALDFYSIHVTRESNHP |
| swap | VKPLEQIGGNSCASGPVGKALSDACMGAVASFLTKYQDIIIEHQKVIKKNEK |
| | RLANLKDIASANGLAFPKITLPPQPHTKEGIEAYNNVVAQIVIWVNLNLWQK |
| | LKIGRDEAKPLQRLKGFPSFPLVERQANEVDWWDMVCNVKKLINEKKEDGKV |
| | FWQNLAGYKRQEALRPYLSSEEDRKKGKKFARYQFGDLLLHLEKKHGEDWGK |
| | VYDEAWERIDKKVEGLSKHIKLEEERRSEDAQSKAALTDWLRAKASFVIEGL |
| | KEADKDEFCRCELKLQKWYGDLRGKPFAIEAENSILDISGFSKQYNCAFIWQ |
| | KDGVKKLNLYLIINYFKGGKLRFKKIKPEAFEANRFYTVINKKSGEIVPMEV |
| | NFNFDDPNLIILPLAFGKRQGREFIWNDLLSLETGSLKLANGRVIEKTLYNR |
| | RTRQDEPALFVALTFERREVLDSSNIKPVNLIGVDRGENIPAVIALTDPEGC |
| | PLPEFKDSSGGPTDILRIGEGYKEKQRAIQAAKEVEQRRAGGYSRKFASKSR |
| | NLADDMVRNSARDLFYHAVTHDAVLVFENLSRGFGRQGKRTFMTERQYTKME |
| | DWLTAKLAYEGLTSKTYLSKTLAQYTSKTCSNCGFTITSADYDRVLEKLKKT |
| | ATGWMTTINGKELKVEGQITYYNRYKRQNVVKDLSVELDRLSEESVNNDISS |
| | WTKGRSGEALSLLKKRFSHRPVQEKFVCLNCGFETHADEQAALNIARSWLFL |
| | RSQEYKKYQTNKTTGNTDKRAFVETWQSFYRKKLKEVWKPAV (SEQ ID |
| | NO: 142) |
| 390: | MQEIKRINKIRRRLVKDSNTKKAGKTGPMKTLLVRVMTPDLRERLENLRKKP |
| L379R + A70 | ENIPQPISNTSRANLNKLLTDYTEMKKAILHVYWEEFQKDPVGLMSRVAQPA |
| 8K + [P793] | PKNIDQRKLIPVKDGNERLTSSGFACSQCCQPLYVYKLEQVNDKGKPHTNYF |
| + X1 RuvC2 | GRCNVSEHERLILLSPHKPEANDELVTYSLGKFGQRALDFYSIHVTRESNHP |
| swap | VKPLEQIGGNSCASGPVGKALSDACMGAVASFLTKYQDIIIEHQKVIKKNEK |
| | RLANLKDIASANGLAFPKITLPPQPHTKEGIEAYNNVVAQIVIWVNLNLWQK |
| | LKIGRDEAKPLQRLKGFPSFPLVERQANEVDWWDMVCNVKKLINEKKEDGKV |
| | FWQNLAGYKRQEALRPYLSSEEDRKKGKKFARYQFGDLLLHLEKKHGEDWGK |
| | VYDEAWERIDKKVEGLSKHIKLEEERRSEDAQSKAALTDWLRAKASFVIEGL |
| | KEADKDEFCRCELKLQKWYGDLRGKPFAIEAENSILDISGFSKQYNCAFIWQ |
| | KDGVKKLNLYLIINYFKGGKLRFKKIKPEAFEANRFYTVINKKSGEIVPMEV |
| | NFNFDDPNLIILPLAFGKRQGREFIWNDLLSLETGSLKLANGRVIEKTLYNR |
| | RTRQDEPALFVALTFERREVLDSSNIKPMNLIGIDRGENIPAVIALTDPEGC |
| | PLSRFKDSLGNPTHILRIGESYKEKQRTIQAKKEVEQRRAGGYSRKYASKAK |
| | NLADDMVRNTARDLLYYAVTQDAMLIFENLSRGFGRQGKRTFMAERQYTRME |
| | DWLTAKLAYEGLSKTYLSKTLAQYTSKTCSNCGFTITSADYDRVLEKLKKTA |
| | TGWMTTINGKELKVEGQITYYNRYKRQNVVKDLSVELDRLSEESVNNDISSW |
| | TKGRSGEALSLLKKRFSHRPVQEKFVCLNCGFETHADEQAALNIARSWLFLN |
| | SNSTEFKSYKSGKQPFVGAWQAFYKRRLKEVWKPNA (SEQ ID NO: |
| | 143) |
| 514: | QEIKRINKIRRRLVKDSNTKKAGKTGPMKTLLVRVMTPDLRERLENLRKKPE |
| H817 in 491 | NIPQPISNTSRANLNKLLTDYTEMKKAILHVYWEEFQKDPVGLMSRVAQPAS |
| | KKIDQNKLKPEMDEKGNLTTAGFACSQCGQPLFVYKLEQVSEKGKAYTNYFG |
| | RCNVAEHEKLILLAQLKPEKDSDEAVTYSLGKFGQRALDFYSIHVTKESTHP |
| | VKPLAQIAGNRYASGPVGKALSDACMGTIASFLSKYQDIIIEHQKVVKGNQK |
| | RLESLRELAGKENLEYPSVTLPPQPHTKEGVDAYNEVIARVRMWVNLNLWQK |
| | LKLSRDDAKPLLRLKGFPSFPLVERQANEVDWWDMVCNVKKLINEKKEDGKV |
| | FWQNLAGYKRQEALRPYLSSEEDRKKGKKFARYQLGDLLLHLEKKHGEDWGK |
| | VYDEAWERIDKKVEGLSKHIKLEEERRSEDAQSKAALTDWLRAKASFVIEGL |
| | KEADKDEFCRCELKLQKWYGDLRGKPFAIEAENSILDISGFSKQYNCAFIWQ |
| | KDGVKKLNLYLIINYFKGGKLRFKKIKPEAFEANRFYTVINKKSGEIVPMEV |
| | NFNFDDPNLIILPLAFGKRQGREFIWNDLLSLETGSLKLANGRVIEKTLYNR |
| | RTRQDEPALFVALTFERREVLDSSNIKPMNLIGVDRGENIPAVIALTDPEGC |
| | PLSRFKDSLGNPTHILRIGESYKEKQRTIQAKKEVEQRRAGGYSRKYASKAK |
| | NLADDMVRNTARDLLYYAVTQDAMLIFENLSRGFGRQGKRTFMAERQYTRME |
| | DWLTAKLAYEGLSKTYLSKTLAQYTSKTCSNCGFTIHTSADYDRVLEKLKKT |
| | ATGWMTTINGKELKVEGQITYYNRYKRQNVVKDLSVELDRLSEESVNNDISS |
| | WTKGRSGEALSLLKKRFSHRPVQEKFVCLNCGFETHADEQAALNIARSWLFL |
| | RSQEYKKYQTNKTTGNTDKRAFVETWQSFYRKKLKEVWKPAV (SEQ ID |
| | NO: 144) |
| 515: | QEIKRINKIRRRLVKDSNTKKAGKTGPMKTLLVRVMTPDLRERLENLRKKPE |
| \hat{ }P793 in 491 | NIPQPISNTSRANLNKLLTDYTEMKKAILHVYWEEFQKDPVGLMSRVAQPAS |
| | KKIDQNKLKPEMDEKGNLTTAGFACSQCGQPLFVYKLEQVSEKGKAYTNYFG |
| | RCNVAEHEKLILLAQLKPEKDSDEAVTYSLGKFGQRALDFYSIHVTKESTHP |
| | VKPLAQIAGNRYASGPVGKALSDACMGTIASFLSKYQDIIIEHQKVVKGNQK |
| | RLESLRELAGKENLEYPSVTLPPQPHTKEGVDAYNEVIARVRMWVNLNLWQK |
| | LKLSRDDAKPLLRLKGFPSFPLVERQANEVDWWDMVCNVKKLINEKKEDGKV |
| | FWQNLAGYKRQEALRPYLSSEEDRKKGKKFARYQLGDLLLHLEKKHGEDWGK |
| | VYDEAWERIDKKVEGLSKHIKLEEERRSEDAQSKAALTDWLRAKASFVIEGL |
| | KEADKDEFCRCELKLQKWYGDLRGKPFAIEAENSILDISGFSKQYNCAFIWQ |
| | KDGVKKLNLYLIINYFKGGKLRFKKIKPEAFEANRFYTVINKKSGEIVPMEV |
| | NFNFDDPNLIILPLAFGKRQGREFIWNDLLSLETGSLKLANGRVIEKTLYNR |
| | RTRQDEPALFVALTFERREVLDSSNIKPMNLIGVDRGENIPAVIALTDPEGC |
| | PLSRFKDSLGNPTHILRIGESYKEKQRTIQAKKEVEQRRAGGYSRKYASKAK |
| | NLADDMVRNTARDLLYYAVTQDAMLIFENLSRGFGRQGKRTFMAERQYTRME |
| | DWLTAKLAYEGLPSKTYLSKTLAQYTSKTCSNCGFTITSADYDRVLEKLKKT |
| | ATGWMTTINGKELKVEGQITYYNRYKRQNVVKDLSVELDRLSEESVNNDISS |
| | WTKGRSGEALSLLKKRFSHRPVQEKFVCLNCGFETHADEQAALNIARSWLFL |
| | RSQEYKKYQTNKTTGNTDKRAFVETWQSFYRKKLKEVWKPAV (SEQ ID |
| | NO: 145) |
| 516: | QEIKRINKIRRRLVKDSNTKKAGKTGPMKTLLVRVMTPDLRERLENLRKKPE |
| L307H in | NIPQPISNTSRANLNKLLTDYTEMKKAILHVYWEEFQKDPVGLMSRVAQPAS |
| 491 | KKIDQNKLKPEMDEKGNLTTAGFACSQCGQPLFVYKLEQVSEKGKAYTNYFG |
| | RCNVAEHEKLILLAQLKPEKDSDEAVTYSLGKFGQRALDFYSIHVTKESTHP |
| | VKPLAQIAGNRYASGPVGKALSDACMGTIASFLSKYQDIIIEHQKVVKGNQK |
| | RLESLRELAGKENLEYPSVTLPPQPHTKEGVDAYNEVIARVRMWVNHNLWQK |
| | LKLSRDDAKPLLRLKGFPSFPLVERQANEVDWWDMVCNVKKLINEKKEDGKV |
| | FWQNLAGYKRQEALRPYLSSEEDRKKGKKFARYQLGDLLLHLEKKHGEDWGK |
| | VYDEAWERIDKKVEGLSKHIKLEEERRSEDAQSKAALTDWLRAKASFVIEGL |
| | KEADKDEFCRCELKLQKWYGDLRGKPFAIEAENSILDISGFSKQYNCAFIWQ |
| | KDGVKKLNLYLIINYFKGGKLRFKKIKPEAFEANRFYTVINKKSGEIVPMEV |
| | NFNFDDPNLIILPLAFGKRQGREFIWNDLLSLETGSLKLANGRVIEKTLYNR |
| | RTRQDEPALFVALTFERREVLDSSNIKPMNLIGVDRGENIPAVIALTDPEGC |
| | PLSRFKDSLGNPTHILRIGESYKEKQRTIQAKKEVEQRRAGGYSRKYASKAK |
| | NLADDMVRNTARDLLYYAVTQDAMLIFENLSRGFGRQGKRTFMAERQYTRME |
| | DWLTAKLAYEGLSKTYLSKTLAQYTSKTCSNCGFTITSADYDRVLEKLKKTA |
| | TGWMTTINGKELKVEGQITYYNRYKRQNVVKDLSVELDRLSEESVNNDISSW |
| | TKGRSGEALSLLKKRFSHRPVQEKFVCLNCGFETHADEQAALNIARSWLFLR |
| | SQEYKKYQTNKTTGNTDKRAFVETWQSFYRKKLKEVWKPAV (SEQ ID |
| | NO: 146) |
| 517: | QEIKRINKIRRRLVKDSNTKKAGKTGPMKTLLVRVMTPDLRERLENLRKKPE |
| \hat{ }A224 in 491 | NIPQPISNTSRANLNKLLTDYTEMKKAILHVYWEEFQKDPVGLMSRVAQPAS |
| | KKIDQNKLKPEMDEKGNLTTAGFACSQCGQPLFVYKLEQVSEKGKAYTNYFG |
| | RCNVAEHEKLILLAQLKPEKDSDEAVTYSLGKFGQRALDFYSIHVTKESTHP |
| | VKPLAQIAGNRYASGAPVGKALSDACMGTIASFLSKYQDIIIEHQKVVKGNQ |
| | KRLESLRELAGKENLEYPSVTLPPQPHTKEGVDAYNEVIARVRMWVNLNLWQ |
| | KLKLSRDDAKPLLRLKGFPSFPLVERQANEVDWWDMVCNVKKLINEKKEDGK |
| | VFWQNLAGYKRQEALRPYLSSEEDRKKGKKFARYQLGDLLLHLEKKHGEDWG |
| | KVYDEAWERIDKKVEGLSKHIKLEEERRSEDAQSKAALTDWLRAKASFVIEG |
| | LKEADKDEFCRCELKLQKWYGDLRGKPFAIEAENSILDISGFSKQYNCAFIW |
| | QKDGVKKLNLYLIINYFKGGKLRFKKIKPEAFEANRFYTVINKKSGEIVPME |
| | VNFNFDDPNLIILPLAFGKRQGREFIWNDLLSLETGSLKLANGRVIEKTLYN |
| | RRTRQDEPALFVALTFERREVLDSSNIKPMNLIGVDRGENIPAVIALTDPEG |
| | CPLSRFKDSLGNPTHILRIGESYKEKQRTIQAKKEVEQRRAGGYSRKYASKA |
| | KNLADDMVRNTARDLLYYAVTQDAMLIFENLSRGFGRQGKRTFMAERQYTRM |
| | EDWLTAKLAYEGLSKTYLSKTLAQYTSKTCSNCGFTITSADYDRVLEKLKKT |
| | ATGWMTTINGKELKVEGQITYYNRYKRQNVVKDLSVELDRLSEESVNNDISS |
| | WTKGRSGEALSLLKKRFSHRPVQEKFVCLNCGFETHADEQAALNIARSWLFL |
| | RSQEYKKYQTNKTTGNTDKRAFVETWQSFYRKKLKEVWKPAV (SEQ ID |
| | NO: 147) |
| 518: | RQEIKRINKIRRRLVKDSNTKKAGKTGPMKTLLVRVMTPDLRERLENLRKKP |
| \hat{ }R1 in 491 | ENIPQPISNTSRANLNKLLTDYTEMKKAILHVYWEEFQKDPVGLMSRVAQPA |
| | SKKIDQNKLKPEMDEKGNLTTAGFACSQCGQPLFVYKLEQVSEKGKAYTNYF |
| | GRCNVAEHEKLILLAQLKPEKDSDEAVTYSLGKFGQRALDFYSIHVTKESTH |
| | PVKPLAQIAGNRYASGAPVGKALSDACMGTIASFLSKYQDIIIEHQKVVKGN |
| | QKRLESLRELAGKENLEYPSVTLPPQPHTKEGVDAYNEVIARVRMWVNLNLW |
| | QKLKLSRDDAKPLLRLKGFPSFPLVERQANEVDWWDMVCNVKKLINEKKEDG |
| | KVFWQNLAGYKRQEALRPYLSSEEDRKKGKKFARYQLGDLLLHLEKKHGEDW |
| | GKVYDEAWERIDKKVEGLSKHIKLEEERRSEDAQSKAALTDWLRAKASFVIE |
| | GLKEADKDEFCRCELKLQKWYGDLRGKPFAIEAENSILDISGFSKQYNCAFI |
| | WQKDGVKKLNLYLIINYFKGGKLRFKKIKPEAFEANRFYTVINKKSGEIVPM |
| | EVNFNFDDPNLIILPLAFGKRQGREFIWNDLLSLETGSLKLANGRVIEKTLY |
| | NRRTRQDEPALFVALTFERREVLDSSNIKPMNLIGVDRGENIPAVIALTDPE |
| | GCPLSRFKDSLGNPTHILRIGESYKEKQRTIQAKKEVEQRRAGGYSRKYASK |
| | AKNLADDMVRNTARDLLYYAVTQDAMLIFENLSRGFGRQGKRTFMAERQYTR |
| | MEDWLTAKLAYEGLSKTYLSKTLAQYTSKTCSNCGFTITSADYDRVLEKLKK |
| | TATGWMTTINGKELKVEGQITYYNRYKRQNVVKDLSVELDRLSEESVNNDIS |
| | SWTKGRSGEALSLLKKRFSHRPVQEKFVCLNCGFETHADEQAALNIARSWLF |
| | LRSQEYKKYQTNKTTGNTDKRAFVETWQSFYRKKLKEVWKPAV (SEQ ID |
| | NO: 148) |
| 519: | QEIKRINKIRRRLVKDSNTKKAGKTGPMKTLLVRVMTPDLRERLENLRKKPE |
| \hat{ }Q692 in 491 | NIPQPISNTSRANLNKLLTDYTEMKKAILHVYWEEFQKDPVGLMSRVAQPAS |
| | KKIDQNKLKPEMDEKGNLTTAGFACSQCGQPLFVYKLEQVSEKGKAYTNYFG |
| | RCNVAEHEKLILLAQLKPEKDSDEAVTYSLGKFGQRALDFYSIHVTKESTHP |
| | VKPLAQIAGNRYASGPVGKALSDACMGTIASFLSKYQDIIIEHQKVVKGNQK |
| | RLESLRELAGKENLEYPSVTLPPQPHTKEGVDAYNEVIARVRMWVNLNLWQK |
| | LKLSRDDAKPLLRLKGFPSFPLVERQANEVDWWDMVCNVKKLINEKKEDGKV |
| | FWQNLAGYKRQEALRPYLSSEEDRKKGKKFARYQLGDLLLHLEKKHGEDWGK |
| | VYDEAWERIDKKVEGLSKHIKLEEERRSEDAQSKAALTDWLRAKASFVIEGL |
| | KEADKDEFCRCELKLQKWYGDLRGKPFAIEAENSILDISGFSKQYNCAFIWQ |
| | KDGVKKLNLYLIINYFKGGKLRFKKIKPEAFEANRFYTVINKKSGEIVPMEV |
| | NFNFDDPNLIILPLAFGKRQGREFIWNDLLSLETGSLKLANGRVIEKTLYNR |
| | RTRQDEPALFVALTFERREVLDSSNIKPMNLIGVDRGENIPAVIALTDPEGC |
| | PLSRFKDSLGNPTHIQLRIGESYKEKQRTIQAKKEVEQRRAGGYSRKYASKA |
| | KNLADDMVRNTARDLLYYAVTQDAMLIFENLSRGFGRQGKRTFMAERQYTRM |
| | EDWLTAKLAYEGLSKTYLSKTLAQYTSKTCSNCGFTITSADYDRVLEKLKKT |
| | ATGWMTTINGKELKVEGQITYYNRYKRQNVVKDLSVELDRLSEESVNNDISS |
| | WTKGRSGEALSLLKKRFSHRPVQEKFVCLNCGFETHADEQAALNIARSWLFL |
| | RSQEYKKYQTNKTTGNTDKRAFVETWQSFYRKKLKEVWKPAV (SEQ ID |
| | NO: 149) |
| 520: | QEIKRINKIRRRLVKDSNTKKAGKTGPMKTLLVRVMTPDLRERLENLRKKPE |
| I705T in 491 | NIPQPISNTSRANLNKLLTDYTEMKKAILHVYWEEFQKDPVGLMSRVAQPAS |
| | KKIDQNKLKPEMDEKGNLTTAGFACSQCGQPLFVYKLEQVSEKGKAYTNYFG |
| | RCNVAEHEKLILLAQLKPEKDSDEAVTYSLGKFGQRALDFYSIHVTKESTHP |
| | VKPLAQIAGNRYASGPVGKALSDACMGTIASFLSKYQDIIIEHQKVVKGNQK |
| | RLESLRELAGKENLEYPSVTLPPQPHTKEGVDAYNEVIARVRMWVNLNLWQK |
| | LKLSRDDAKPLLRLKGFPSFPLVERQANEVDWWDMVCNVKKLINEKKEDGKV |
| | FWQNLAGYKRQEALRPYLSSEEDRKKGKKFARYQLGDLLLHLEKKHGEDWGK |
| | VYDEAWERIDKKVEGLSKHIKLEEERRSEDAQSKAALTDWLRAKASFVIEGL |
| | KEADKDEFCRCELKLQKWYGDLRGKPFAIEAENSILDISGFSKQYNCAFIWQ |
| | KDGVKKLNLYLIINYFKGGKLRFKKIKPEAFEANRFYTVINKKSGEIVPMEV |
| | NFNFDDPNLIILPLAFGKRQGREFIWNDLLSLETGSLKLANGRVIEKTLYNR |
| | RTRQDEPALFVALTFERREVLDSSNIKPMNLIGVDRGENIPAVIALTDPEGC |
| | PLSRFKDSLGNPTHILRIGESYKEKQRTTQAKKEVEQRRAGGYSRKYASKAK |
| | NLADDMVRNTARDLLYYAVTQDAMLIFENLSRGFGRQGKRTFMAERQYTRME |
| | DWLTAKLAYEGLSKTYLSKTLAQYTSKTCSNCGFTITSADYDRVLEKLKKTA |
| | TGWMTTINGKELKVEGQITYYNRYKRQNVVKDLSVELDRLSEESVNNDISSW |
| | TKGRSGEALSLLKKRFSHRPVQEKFVCLNCGFETHADEQAALNIARSWLFLR |
| | SQEYKKYQTNKTTGNTDKRAFVETWQSFYRKKLKEVWKPAV (SEQ ID |
| | NO: 150) |
| 522: | QEIKRINKIRRRLVKDSNTKKAGKTGPMKTLLVRVMTPDLRERLENLRKKPE |
| D683R in | NIPQPISNTSRANLNKLLTDYTEMKKAILHVYWEEFQKDPVGLMSRVAQPAS |
| 491 | KKIDQNKLKPEMDEKGNLTTAGFACSQCGQPLFVYKLEQVSEKGKAYTNYFG |
| | RCNVAEHEKLILLAQLKPEKDSDEAVTYSLGKFGQRALDFYSIHVTKESTHP |
| | VKPLAQIAGNRYASGPVGKALSDACMGTIASFLSKYQDIIIEHQKVVKGNQK |
| | RLESLRELAGKENLEYPSVTLPPQPHTKEGVDAYNEVIARVRMWVNLNLWQK |
| | LKLSRDDAKPLLRLKGFPSFPLVERQANEVDWWDMVCNVKKLINEKKEDGKV |
| | FWQNLAGYKRQEALRPYLSSEEDRKKGKKFARYQLGDLLLHLEKKHGEDWGK |
| | VYDEAWERIDKKVEGLSKHIKLEEERRSEDAQSKAALTDWLRAKASFVIEGL |
| | KEADKDEFCRCELKLQKWYGDLRGKPFAIEAENSILDISGFSKQYNCAFIWQ |
| | KDGVKKLNLYLIINYFKGGKLRFKKIKPEAFEANRFYTVINKKSGEIVPMEV |
| | NFNFDDPNLIILPLAFGKRQGREFIWNDLLSLETGSLKLANGRVIEKTLYNR |
| | RTRQDEPALFVALTFERREVLDSSNIKPMNLIGVDRGENIPAVIALTDPEGC |
| | PLSRFKRSLGNPTHILRIGESYKEKQRTIQAKKEVEQRRAGGYSRKYASKAK |
| | NLADDMVRNTARDLLYYAVTQDAMLIFENLSRGFGRQGKRTFMAERQYTRME |
| | DWLTAKLAYEGLSKTYLSKTLAQYTSKTCSNCGFTITSADYDRVLEKLKKTA |
| | TGWMTTINGKELKVEGQITYYNRYKRQNVVKDLSVELDRLSEESVNNDISSW |
| | TKGRSGEALSLLKKRFSHRPVQEKFVCLNCGFETHADEQAALNIARSWLFLR |
| | SQEYKKYQTNKTTGNTDKRAFVETWQSFYRKKLKEVWKPAV (SEQ ID |
| | NO: 151) |
| 523: | QEIKRINKIRRRLVKDSNTKKAGKTYPMKTLLVRVMTPDLRERLENLRKKPE |
| G26Y in 491 | NIPQPISNTSRANLNKLLTDYTEMKKAILHVYWEEFQKDPVGLMSRVAQPAS |
| | KKIDQNKLKPEMDEKGNLTTAGFACSQCGQPLFVYKLEQVSEKGKAYTNYFG |
| | RCNVAEHEKLILLAQLKPEKDSDEAVTYSLGKFGQRALDFYSIHVTKESTHP |
| | VKPLAQIAGNRYASGPVGKALSDACMGTIASFLSKYQDIIIEHQKVVKGNQK |
| | RLESLRELAGKENLEYPSVTLPPQPHTKEGVDAYNEVIARVRMWVNLNLWQK |
| | LKLSRDDAKPLLRLKGFPSFPLVERQANEVDWWDMVCNVKKLINEKKEDGKV |
| | FWQNLAGYKRQEALRPYLSSEEDRKKGKKFARYQLGDLLLHLEKKHGEDWGK |
| | VYDEAWERIDKKVEGLSKHIKLEEERRSEDAQSKAALTDWLRAKASFVIEGL |
| | KEADKDEFCRCELKLQKWYGDLRGKPFAIEAENSILDISGFSKQYNCAFIWQ |
| | KDGVKKLNLYLIINYFKGGKLRFKKIKPEAFEANRFYTVINKKSGEIVPMEV |
| | NFNFDDPNLIILPLAFGKRQGREFIWNDLLSLETGSLKLANGRVIEKTLYNR |
| | RTRQDEPALFVALTFERREVLDSSNIKPMNLIGVDRGENIPAVIALTDPEGC |
| | PLSRFKDSLGNPTHILRIGESYKEKQRTIQAKKEVEQRRAGGYSRKYASKAK |
| | NLADDMVRNTARDLLYYAVTQDAMLIFENLSRGFGRQGKRTFMAERQYTRME |
| | DWLTAKLAYEGLSKTYLSKTLAQYTSKTCSNCGFTITSADYDRVLEKLKKTA |
| | TGWMTTINGKELKVEGQITYYNRYKRQNVVKDLSVELDRLSEESVNNDISSW |
| | TKGRSGEALSLLKKRFSHRPVQEKFVCLNCGFETHADEQAALNIARSWLFLR |
| | SQEYKKYQTNKTTGNTDKRAFVETWQSFYRKKLKEVWKPAV (SEQ ID |
| | NO: 152) |
| 524: | QEIKRINKIRRRLVKDSNTKKAGKTGPMKTLLVRVMTPDLRERLENLRKKPE |
| T817H in | NIPQPISNTSRANLNKLLTDYTEMKKAILHVYWEEFQKDPVGLMSRVAQPAS |
| 491 | KKIDQNKLKPEMDEKGNLTTAGFACSQCGQPLFVYKLEQVSEKGKAYTNYFG |
| | RCNVAEHEKLILLAQLKPEKDSDEAVTYSLGKFGQRALDFYSIHVTKESTHP |
| | VKPLAQIAGNRYASGPVGKALSDACMGTIASFLSKYQDIIIEHQKVVKGNQK |
| | RLESLRELAGKENLEYPSVTLPPQPHTKEGVDAYNEVIARVRMWVNLNLWQK |
| | LKLSRDDAKPLLRLKGFPSFPLVERQANEVDWWDMVCNVKKLINEKKEDGKV |
| | FWQNLAGYKRQEALRPYLSSEEDRKKGKKFARYQLGDLLLHLEKKHGEDWGK |
| | VYDEAWERIDKKVEGLSKHIKLEEERRSEDAQSKAALTDWLRAKASFVIEGL |
| | KEADKDEFCRCELKLQKWYGDLRGKPFAIEAENSILDISGFSKQYNCAFIWQ |
| | KDGVKKLNLYLIINYFKGGKLRFKKIKPEAFEANRFYTVINKKSGEIVPMEV |
| | NFNFDDPNLIILPLAFGKRQGREFIWNDLLSLETGSLKLANGRVIEKTLYNR |
| | RTRQDEPALFVALTFERREVLDSSNIKPMNLIGVDRGENIPAVIALTDPEGC |
| | PLSRFKDSLGNPTHILRIGESYKEKQRTIQAKKEVEQRRAGGYSRKYASKAK |
| | NLADDMVRNTARDLLYYAVTQDAMLIFENLSRGFGRQGKRTFMAERQYTRME |
| | DWLTAKLAYEGLSKTYLSKTLAQYTSKTCSNCGFTIHSADYDRVLEKLKKTA |
| | TGWMTTINGKELKVEGQITYYNRYKRQNVVKDLSVELDRLSEESVNNDISSW |
| | TKGRSGEALSLLKKRFSHRPVQEKFVCLNCGFETHADEQAALNIARSWLFLR |
| | SQEYKKYQTNKTTGNTDKRAFVETWQSFYRKKLKEVWKPAV (SEQ ID |
| | NO: 153) |
| 525: | QEIKRINKIRRRLVKDSNTKKAGKTGPMKTLLVRVMTPDLRERLENLRKKPE |
| V746A in | NIPQPISNTSRANLNKLLTDYTEMKKAILHVYWEEFQKDPVGLMSRVAQPAS |
| 491 | KKIDQNKLKPEMDEKGNLTTAGFACSQCGQPLFVYKLEQVSEKGKAYTNYFG |
| | RCNVAEHEKLILLAQLKPEKDSDEAVTYSLGKFGQRALDFYSIHVTKESTHP |
| | VKPLAQIAGNRYASGPVGKALSDACMGTIASFLSKYQDIIIEHQKVVKGNQK |
| | RLESLRELAGKENLEYPSVTLPPQPHTKEGVDAYNEVIARVRMWVNLNLWQK |
| | LKLSRDDAKPLLRLKGFPSFPLVERQANEVDWWDMVCNVKKLINEKKEDGKV |
| | FWQNLAGYKRQEALRPYLSSEEDRKKGKKFARYQLGDLLLHLEKKHGEDWGK |
| | VYDEAWERIDKKVEGLSKHIKLEEERRSEDAQSKAALTDWLRAKASFVIEGL |
| | KEADKDEFCRCELKLQKWYGDLRGKPFAIEAENSILDISGFSKQYNCAFIWQ |
| | KDGVKKLNLYLIINYFKGGKLRFKKIKPEAFEANRFYTVINKKSGEIVPMEV |
| | NFNFDDPNLIILPLAFGKRQGREFIWNDLLSLETGSLKLANGRVIEKTLYNR |
| | RTRQDEPALFVALTFERREVLDSSNIKPMNLIGVDRGENIPAVIALTDPEGC |
| | PLSRFKDSLGNPTHILRIGESYKEKQRTIQAKKEVEQRRAGGYSRKYASKAK |
| | NLADDMVRNTARDLLYYAATQDAMLIFENLSRGFGRQGKRTFMAERQYTRME |
| | DWLTAKLAYEGLSKTYLSKTLAQYTSKTCSNCGFTITSADYDRVLEKLKKTA |
| | TGWMTTINGKELKVEGQITYYNRYKRQNVVKDLSVELDRLSEESVNNDISSW |
| | TKGRSGEALSLLKKRFSHRPVQEKFVCLNCGFETHADEQAALNIARSWLFLR |
| | SQEYKKYQTNKTTGNTDKRAFVETWQSFYRKKLKEVWKPAV (SEQ ID |
| | NO: 154) |
| 526: | QEIKRINKIRRRLVKDSNTKKAGKTGPMKTLLVRVMTPDLRERLENLRKKPE |
| K708A in | NIPQPISNTSRANLNKLLTDYTEMKKAILHVYWEEFQKDPVGLMSRVAQPAS |
| 491 | KKIDQNKLKPEMDEKGNLTTAGFACSQCGQPLFVYKLEQVSEKGKAYTNYFG |
| | RCNVAEHEKLILLAQLKPEKDSDEAVTYSLGKFGQRALDFYSIHVTKESTHP |
| | VKPLAQIAGNRYASGPVGKALSDACMGTIASFLSKYQDIIIEHQKVVKGNQK |
| | RLESLRELAGKENLEYPSVTLPPQPHTKEGVDAYNEVIARVRMWVNLNLWQK |
| | LKLSRDDAKPLLRLKGFPSFPLVERQANEVDWWDMVCNVKKLINEKKEDGKV |
| | FWQNLAGYKRQEALRPYLSSEEDRKKGKKFARYQLGDLLLHLEKKHGEDWGK |
| | VYDEAWERIDKKVEGLSKHIKLEEERRSEDAQSKAALTDWLRAKASFVIEGL |
| | KEADKDEFCRCELKLQKWYGDLRGKPFAIEAENSILDISGFSKQYNCAFIWQ |
| | KDGVKKLNLYLIINYFKGGKLRFKKIKPEAFEANRFYTVINKKSGEIVPMEV |
| | NFNFDDPNLIILPLAFGKRQGREFIWNDLLSLETGSLKLANGRVIEKTLYNR |
| | RTRQDEPALFVALTFERREVLDSSNIKPMNLIGVDRGENIPAVIALTDPEGC |
| | PLSRFKDSLGNPTHILRIGESYKEKQRTIQAAKEVEQRRAGGYSRKYASKAK |
| | NLADDMVRNTARDLLYYAVTQDAMLIFENLSRGFGRQGKRTFMAERQYTRME |
| | DWLTAKLAYEGLSKTYLSKTLAQYTSKTCSNCGFTITSADYDRVLEKLKKTA |
| | TGWMTTINGKELKVEGQITYYNRYKRQNVVKDLSVELDRLSEESVNNDISSW |
| | TKGRSGEALSLLKKRFSHRPVQEKFVCLNCGFETHADEQAALNIARSWLFLR |
| | SQEYKKYQTNKTTGNTDKRAFVETWQSFYRKKLKEVWKPAV (SEQ ID |
| | NO: 155) |
| 527: | QEIKRINKIRRRLVKDSNTKKAGKTRGPMKTLLVRVMTPDLRERLENLRKKP |
| \hat{ }R26 in 491 | ENIPQPISNTSRANLNKLLTDYTEMKKAILHVYWEEFQKDPVGLMSRVAQPA |
| | SKKIDQNKLKPEMDEKGNLTTAGFACSQCGQPLFVYKLEQVSEKGKAYTNYF |
| | GRCNVAEHEKLILLAQLKPEKDSDEAVTYSLGKFGQRALDFYSIHVTKESTH |
| | PVKPLAQIAGNRYASGPVGKALSDACMGTIASFLSKYQDIIIEHQKVVKGNQ |
| | KRLESLRELAGKENLEYPSVTLPPQPHTKEGVDAYNEVIARVRMWVNLNLWQ |
| | KLKLSRDDAKPLLRLKGFPSFPLVERQANEVDWWDMVCNVKKLINEKKEDGK |
| | VFWQNLAGYKRQEALRPYLSSEEDRKKGKKFARYQLGDLLLHLEKKHGEDWG |
| | KVYDEAWERIDKKVEGLSKHIKLEEERRSEDAQSKAALTDWLRAKASFVIEG |
| | LKEADKDEFCRCELKLQKWYGDLRGKPFAIEAENSILDISGFSKQYNCAFIW |
| | QKDGVKKLNLYLIINYFKGGKLRFKKIKPEAFEANRFYTVINKKSGEIVPME |
| | VNFNFDDPNLIILPLAFGKRQGREFIWNDLLSLETGSLKLANGRVIEKTLYN |
| | RRTRQDEPALFVALTFERREVLDSSNIKPMNLIGVDRGENIPAVIALTDPEG |
| | CPLSRFKDSLGNPTHILRIGESYKEKQRTIQAKKEVEQRRAGGYSRKYASKA |
| | KNLADDMVRNTARDLLYYAVTQDAMLIFENLSRGFGRQGKRTFMAERQYTRM |
| | EDWLTAKLAYEGLSKTYLSKTLAQYTSKTCSNCGFTITSADYDRVLEKLKKT |
| | ATGWMTTINGKELKVEGQITYYNRYKRQNVVKDLSVELDRLSEESVNNDISS |
| | WTKGRSGEALSLLKKRFSHRPVQEKFVCLNCGFETHADEQAALNIARSWLFL |
| | RSQEYKKYQTNKTTGNTDKRAFVETWQSFYRKKLKEVWKPAV (SEQ ID |
| | NO: 156) |
| 528: | QEIKRINKIRRRLVKDSNTKKAGKTGPMKTLLVRVMTPDLRERLENLRKKPE |
| G223Y in | NIPQPISNTSRANLNKLLTDYTEMKKAILHVYWEEFQKDPVGLMSRVAQPAS |
| 515 | KKIDQNKLKPEMDEKGNLTTAGFACSQCGQPLFVYKLEQVSEKGKAYTNYFG |
| | RCNVAEHEKLILLAQLKPEKDSDEAVTYSLGKFGQRALDFYSIHVTKESTHP |
| | VKPLAQIAGNRYASYPVGKALSDACMGTIASFLSKYQDIIIEHQKVVKGNQK |
| | RLESLRELAGKENLEYPSVTLPPQPHTKEGVDAYNEVIARVRMWVNLNLWQK |
| | LKLSRDDAKPLLRLKGFPSFPLVERQANEVDWWDMVCNVKKLINEKKEDGKV |
| | FWQNLAGYKRQEALRPYLSSEEDRKKGKKFARYQLGDLLLHLEKKHGEDWGK |
| | VYDEAWERIDKKVEGLSKHIKLEEERRSEDAQSKAALTDWLRAKASFVIEGL |
| | KEADKDEFCRCELKLQKWYGDLRGKPFAIEAENSILDISGFSKQYNCAFIWQ |
| | KDGVKKLNLYLIINYFKGGKLRFKKIKPEAFEANRFYTVINKKSGEIVPMEV |
| | NFNFDDPNLIILPLAFGKRQGREFIWNDLLSLETGSLKLANGRVIEKTLYNR |
| | RTRQDEPALFVALTFERREVLDSSNIKPMNLIGVDRGENIPAVIALTDPEGC |
| | PLSRFKDSLGNPTHILRIGESYKEKQRTIQAKKEVEQRRAGGYSRKYASKAK |
| | NLADDMVRNTARDLLYYAVTQDAMLIFENLSRGFGRQGKRTFMAERQYTRME |
| | DWLTAKLAYEGLPSKTYLSKTLAQYTSKTCSNCGFTITSADYDRVLEKLKKT |
| | ATGWMTTINGKELKVEGQITYYNRYKRQNVVKDLSVELDRLSEESVNNDISS |
| | WTKGRSGEALSLLKKRFSHRPVQEKFVCLNCGFETHADEQAALNIARSWLFL |
| | RSQEYKKYQTNKTTGNTDKRAFVETWQSFYRKKLKEVWKPAV (SEQ ID |
| | NO: 157) |
| 529: | QEIKRINKIRRRLVKDSNTKKAGKTGPMKTLLVRVMTPDLRERLENLRKKPE |
| G223N in | NIPQPISNTSRANLNKLLTDYTEMKKAILHVYWEEFQKDPVGLMSRVAQPAS |
| 515 | KKIDQNKLKPEMDEKGNLTTAGFACSQCGQPLFVYKLEQVSEKGKAYTNYFG |
| | RCNVAEHEKLILLAQLKPEKDSDEAVTYSLGKFGQRALDFYSIHVTKESTHP |
| | VKPLAQIAGNRYASNPVGKALSDACMGTIASFLSKYQDIIIEHQKVVKGNQK |
| | RLESLRELAGKENLEYPSVTLPPQPHTKEGVDAYNEVIARVRMWVNLNLWQK |
| | LKLSRDDAKPLLRLKGFPSFPLVERQANEVDWWDMVCNVKKLINEKKEDGKV |
| | FWQNLAGYKRQEALRPYLSSEEDRKKGKKFARYQLGDLLLHLEKKHGEDWGK |
| | VYDEAWERIDKKVEGLSKHIKLEEERRSEDAQSKAALTDWLRAKASFVIEGL |
| | KEADKDEFCRCELKLQKWYGDLRGKPFAIEAENSILDISGFSKQYNCAFIWQ |
| | KDGVKKLNLYLIINYFKGGKLRFKKIKPEAFEANRFYTVINKKSGEIVPMEV |
| | NFNFDDPNLIILPLAFGKRQGREFIWNDLLSLETGSLKLANGRVIEKTLYNR |
| | RTRQDEPALFVALTFERREVLDSSNIKPMNLIGVDRGENIPAVIALTDPEGC |
| | PLSRFKDSLGNPTHILRIGESYKEKQRTIQAKKEVEQRRAGGYSRKYASKAK |
| | NLADDMVRNTARDLLYYAVTQDAMLIFENLSRGFGRQGKRTFMAERQYTRME |
| | DWLTAKLAYEGLPSKTYLSKTLAQYTSKTCSNCGFTITSADYDRVLEKLKKT |
| | ATGWMTTINGKELKVEGQITYYNRYKRQNVVKDLSVELDRLSEESVNNDISS |
| | WTKGRSGEALSLLKKRFSHRPVQEKFVCLNCGFETHADEQAALNIARSWLFL |
| | RSQEYKKYQTNKTTGNTDKRAFVETWQSFYRKKLKEVWKPAV (SEQ ID |
| | NO: 158) |
| 530: | QEIKRINKIRRRLVKDSNTKKAGKTGPMKTLLVRVMTPDLRERLENLRKKPE |
| \hat{ }W539 in | NIPQPISNTSRANLNKLLTDYTEMKKAILHVYWEEFQKDPVGLMSRVAQPAS |
| 515 | KKIDQNKLKPEMDEKGNLTTAGFACSQCGQPLFVYKLEQVSEKGKAYTNYFG |
| | RCNVAEHEKLILLAQLKPEKDSDEAVTYSLGKFGQRALDFYSIHVTKESTHP |
| | VKPLAQIAGNRYASGPVGKALSDACMGTIASFLSKYQDIIIEHQKVVKGNQK |
| | RLESLRELAGKENLEYPSVTLPPQPHTKEGVDAYNEVIARVRMWVNLNLWQK |
| | LKLSRDDAKPLLRLKGFPSFPLVERQANEVDWWDMVCNVKKLINEKKEDGKV |
| | FWQNLAGYKRQEALRPYLSSEEDRKKGKKFARYQLGDLLLHLEKKHGEDWGK |
| | VYDEAWERIDKKVEGLSKHIKLEEERRSEDAQSKAALTDWLRAKASFVIEGL |
| | KEADKDEFCRCELKLQKWYGDLRGKPFAIEAENSILDISGFSKQYNCAFIWQ |
| | KDGVKKLNLYLIINYFKGWGKLRFKKIKPEAFEANRFYTVINKKSGEIVPME |
| | VNFNFDDPNLIILPLAFGKRQGREFIWNDLLSLETGSLKLANGRVIEKTLYN |
| | RRTRQDEPALFVALTFERREVLDSSNIKPMNLIGVDRGENIPAVIALTDPEG |
| | CPLSRFKDSLGNPTHILRIGESYKEKQRTIQAKKEVEQRRAGGYSRKYASKA |
| | KNLADDMVRNTARDLLYYAVTQDAMLIFENLSRGFGRQGKRTFMAERQYTRM |
| | EDWLTAKLAYEGLPSKTYLSKTLAQYTSKTCSNCGFTITSADYDRVLEKLKK |
| | TATGWMTTINGKELKVEGQITYYNRYKRQNVVKDLSVELDRLSEESVNNDIS |
| | SWTKGRSGEALSLLKKRFSHRPVQEKFVCLNCGFETHADEQAALNIARSWLF |
| | LRSQEYKKYQTNKTTGNTDKRAFVETWQSFYRKKLKEVWKPAV (SEQ ID |
| | NO: 159) |
| 531: | QEIKRINKIRRRLVKDSNTKKAGKTGPMKTLLVRVMTPDLRERLENLRKKPE |
| \hat{ }Y539 in515 | NIPQPISNTSRANLNKLLTDYTEMKKAILHVYWEEFQKDPVGLMSRVAQPAS |
| | KKIDQNKLKPEMDEKGNLTTAGFACSQCGQPLFVYKLEQVSEKGKAYTNYFG |
| | RCNVAEHEKLILLAQLKPEKDSDEAVTYSLGKFGQRALDFYSIHVTKESTHP |
| | VKPLAQIAGNRYASGPVGKALSDACMGTIASFLSKYQDIIIEHQKVVKGNQK |
| | RLESLRELAGKENLEYPSVTLPPQPHTKEGVDAYNEVIARVRMWVNLNLWQK |
| | LKLSRDDAKPLLRLKGFPSFPLVERQANEVDWWDMVCNVKKLINEKKEDGKV |
| | FWQNLAGYKRQEALRPYLSSEEDRKKGKKFARYQLGDLLLHLEKKHGEDWGK |
| | VYDEAWERIDKKVEGLSKHIKLEEERRSEDAQSKAALTDWLRAKASFVIEGL |
| | KEADKDEFCRCELKLQKWYGDLRGKPFAIEAENSILDISGFSKQYNCAFIWQ |
| | KDGVKKLNLYLIINYFKGYGKLRFKKIKPEAFEANRFYTVINKKSGEIVPME |
| | VNFNFDDPNLIILPLAFGKRQGREFIWNDLLSLETGSLKLANGRVIEKTLYN |
| | RRTRQDEPALFVALTFERREVLDSSNIKPMNLIGVDRGENIPAVIALTDPEG |
| | CPLSRFKDSLGNPTHILRIGESYKEKQRTIQAKKEVEQRRAGGYSRKYASKA |
| | KNLADDMVRNTARDLLYYAVTQDAMLIFENLSRGFGRQGKRTFMAERQYTRM |
| | EDWLTAKLAYEGLPSKTYLSKTLAQYTSKTCSNCGFTITSADYDRVLEKLKK |
| | TATGWMTTINGKELKVEGQITYYNRYKRQNVVKDLSVELDRLSEESVNNDIS |
| | SWTKGRSGEALSLLKKRFSHRPVQEKFVCLNCGFETHADEQAALNIARSWLF |
| | LRSQEYKKYQTNKTTGNTDKRAFVETWQSFYRKKLKEVWKPAV (SEQ ID |
| | NO: 160) |

[0237] In some embodiments, the CasX variant protein comprises a sequence selected from the group consisting of SEQ ID NOS: 49-160, 439, 441, 443, 445, 447-460, 472, 474, 476, 478, 480, 482, 484, 486, 488, and 490, or a sequence having at least about 50%, at least about 60%, at least about 70%, at least about 80%, at least about 90%, or at least about 95%, or at least about 95%, or at least about 96%, or at least about 97%, or at least about 98%, or at least about 99% sequence identity thereto. In some embodiments, the CasX variant protein comprises a sequence selected from the group consisting of SEQ ID NOS: 49-160, 439, 441, 443, 445, 447-460, 472, 474, 476, 478, 480, 482, 484, 486, 488, and 490. In some embodiments, the CasX variant protein comprises a sequence selected from the group consisting of SEQ ID NOs: 49-160, or a sequence having at least about 50%, at least about 60%, at least about 70%, at least about 80%, at least about 90%, or at least about 95%, or at least about 95%, or at least about 96%, or at least about 97%, or at least about 98%, or at least about 99% sequence identity thereto. In some embodiments, the CasX variant protein comprises a sequence selected from the group consisting of SEQ ID NOs: 49-160.

[0238] In some embodiments, the CasX variant protein has one or more improved characteristics of the CasX protein when compared to a reference CasX protein, for example a reference protein of SEQ ID NO: 1, SEQ ID NO: 2 or SEQ ID NO: 3. In some embodiments, the at least one improved characteristic of the CasX variant is at least about 1.1 to about 100,000-fold improved relative to the reference protein. In some embodiments, the at least one improved characteristic of the CasX variant is at least about 1.1 to about 10,000-fold improved, at least about 1.1 to about 1,000-fold improved, at least about 1.1 to about 500-fold improved, at least about 1.1 to about 400-fold improved, at least about 1.1 to about 300-fold improved, at least about 1.1 to about 200-fold improved, at least about 1.1 to about 100-fold improved, at least about 1.1 to about 50-fold improved, at least about 1.1 to about 40-fold improved, at least about 1.1 to about 30-fold improved, at least about 1.1 to about 20-fold improved, at least about 1.1 to about 10-fold improved, at least about 1.1 to about 9-fold improved, at least about 1.1 to about 8-fold improved, at least about 1.1 to about 7-fold improved, at least about 1.1 to about 6-fold improved, at least about 1.1 to about 5-fold improved, at least about 1.1 to about 4-fold improved, at least about 1.1 to about 3-fold improved, at least about 1.1 to about 2-fold improved, at least about 1.1 to about 1.5-fold improved, at least about 1.5 to about 3-fold improved, at least about 1.5 to about 4-fold improved, at least about 1.5 to about 5-fold improved, at least about 1.5 to about 10-fold improved, at least about 5 to about 10-fold improved, at least about 10 to about 20-fold improved, at least 10 to about 30-fold improved, at least 10 to about 50-fold improved or at least 10 to about 100-fold improved than the reference CasX protein. In some embodiments, the at least one improved characteristic of the CasX variant is at least about 10 to about 1000-fold improved relative to the reference CasX protein.

[0239] In some embodiments, the at least one improved characteristic of the CasX variant protein is at least about 5, at least about 10, at least about 20, at least about 30, at least about 40, at least about 50, at least about 60, at least about 70, at least about 80, at least about 90, at least about 100, at least about 250, at least about 500, at least about 1000, at least about 5,000 or at least about 10,000-fold improved relative to a reference CasX protein. In some embodiments, a CasX variant protein is at least about 1.1, at least about 1.2, at least about 1.3, at least about 1.4, at least about 1.5, at least about 1.6, at least about 1.7, at least about 1.8, at least about 1.9, at least about 2, at least about 2.1, at least about 2.2, at least about 2.3, at least about 2.4, at least about 2.5, at least about 2.6, at least about 2.7, at least about 2.8, at least about 2.9, at least about 3, at least about 3.5, at least about 4, at least about 4.5, at least about 5, at least about 5.5, at least about 6, at least about 6.5, at least about 7.0, at least about 7.5, at least about 8, at least about 8.5, at least about 9, at least about 9.5, at least about 10, at least about 11, at least about 12, at least about 13, at least about 14, at least about 15, at least about 20, at least about 30, at least about 40, at least about 50, at least about 60, at least about 70, at least about 80, at least about 90 at least about 100, at least about 500, at least about 1,000 or at least about 10,000-fold improved relative to a reference CasX protein. Exemplary characteristics that can be improved in CasX variant proteins relative to the same characteristics in reference CasX proteins include, but are not limited to, improved folding of the variant, improved binding affinity to the gNA, improved binding affinity to the target DNA, altered binding affinity to one or more PAM sequences, improved unwinding of the target DNA, increased activity, improved editing efficiency, improved editing specificity, increased activity of the nuclease, increased target strand loading for double strand cleavage, decreased target strand loading for single strand nicking, decreased off-target cleavage, improved binding of the non-target strand of DNA, improved target nucleic acid sequence cleavage rate, improved protein stability, improved protein:gNA complex stability, improved protein solubility, improved ribonuclear protein complex (RNP) formation, higher percentage of cleavage-competent RNP, improved protein:gNA complex (RNP) solubility, improved protein yield, improved protein expression, and improved fusion characteristics. In some embodiments, the variant comprises at least one improved characteristic. In other embodiments, the variant comprises at least two improved characteristics. In further embodiments, the variant comprises at least three improved characteristics. In some embodiments, the variant comprises at least four improved characteristics. In still further embodiments, the variant comprises at least five, at least six, at least seven, at least eight, at least nine, at least ten, at least eleven, at least twelve, at least thirteen, or more improved characteristics. These improved characteristics are described in more detail below.

[0240] j. Protein Stability

[0241] In some embodiments, the disclosure provides a CasX variant protein with improved stability relative to a reference CasX protein. In some embodiments, improved stability of the CasX variant protein results in expression of a higher steady state of protein, which improves editing efficiency. In some embodiments, improved stability of the CasX variant protein results in a larger fraction of CasX protein that remains folded in a functional conformation and improves editing efficiency or improves purifiability for manufacturing purposes. As used herein, a “functional conformation” refers to a CasX protein that is in a conformation where the protein is capable of binding a gNA and target DNA. In embodiments wherein the CasX variant does not carry one or more mutations rendering it catalytically dead, the CasX variant is capable of cleaving, nicking, or otherwise modifying the target DNA. For example, a functional CasX variant can, in some embodiments, be used for gene-editing, and a functional conformation refers to an “editing-competent” conformation. In some exemplary embodiments, including those embodiments where the CasX variant protein results in a larger fraction of CasX protein that remains folded in a functional conformation, a lower concentration of CasX variant is needed for applications such as gene editing compared to a reference CasX protein. Thus, in some embodiments, the CasX variant with improved stability has improved efficiency compared to a reference CasX in one or more gene editing contexts.

[0242] In some embodiments, the disclosure provides a CasX variant protein having improved thermostability relative to a reference CasX protein. In some embodiments, the CasX variant protein has improved thermostability of the CasX variant protein at a particular temperature range. Without wishing to be bound by any theory, some reference CasX proteins natively function in organisms with niches in groundwater and sediment; thus, some reference CasX proteins may have evolved to exhibit optimal function at lower or higher temperatures that may be desirable for certain applications. For example, one application of CasX variant proteins is gene editing of mammalian cells, which is typically carried out at about 37° C. In some embodiments, a CasX variant protein as described herein has improved thermostability compared to a reference CasX protein at a temperature of at least 16° C., at least 18° C., at least 20° C., at least 22° C., at least 24° C., at least 26° C., at least 28° C., at least 30° C., at least 32° C., at least 34° C., at least 35° C., at least 36° C., at least 37° C., at least 38° C., at least 39° C., at least 40° C., at least 41° C., at least 42° C., at least 44° C., at least 46° C., at least 48° C., at least 50° C., at least 52° C., or greater. In some embodiments, a CasX variant protein has improved thermostability and functionality compared to a reference CasX protein that results in improved gene editing functionality, such as mammalian gene editing applications, which may include human gene editing applications.

[0243] In some embodiments, the disclosure provides a CasX variant protein having improved stability of the CasX variant protein:gNA complex relative to the reference CasX protein:gNA complex such that the RNP remains in a functional form. Stability improvements can include increased thermostability, resistance to proteolytic degradation, enhanced pharmacokinetic properties, stability across a range of pH conditions, salt conditions, and tonicity. Improved stability of the complex may, in some embodiments, lead to improved editing efficiency.

[0244] In some embodiments, the disclosure provides a CasX variant protein having improved thermostability of the CasX variant protein:gNA complex relative to the reference CasX protein:gNA complex. In some embodiments, a CasX variant protein has improved thermostability relative to a reference CasX protein. In some embodiments, the CasX variant protein:gNA complex has improved thermostability relative to a complex comprising a reference CasX protein at temperatures of at least 16° C., at least 18° C., at least 20° C., at least 22° C., at least 24° C., at least 26° C., at least 28° C., at least 30° C., at least 32° C., at least 34° C., at least 35° C., at least 36° C., at least 37° C., at least 38° C., at least 39° C., at least 40° C., at least 41° C., at least 42° C., at least 44° C., at least 46° C., at least 48° C., at least 50° C., at least 52° C., or greater. In some embodiments, a CasX variant protein has improved thermostability of the CasX variant protein:gNA complex compared to a reference CasX protein:gNA complex, which results in improved function for gene editing applications, such as mammalian gene editing applications, which may include human gene editing applications.

[0245] In some embodiments, the improved stability and/or thermostability of the CasX variant protein comprises faster folding kinetics of the CasX variant protein relative to a reference CasX protein, slower unfolding kinetics of the CasX variant protein relative to a reference CasX protein, a larger free energy release upon folding of the CasX variant protein relative to a reference CasX protein, a higher temperature at which 50% of the CasX variant protein is unfolded (Tm) relative to a reference CasX protein, or any combination thereof. These characteristics may be improved by a wide range of values; for example, at least 1.1, at least 1.5, at least 10, at least 50, at least 100, at least 500, at least 1,000, at least 5,000, or at least a 10,000-fold improved, as compared to a reference CasX protein. In some embodiments, improved thermostability of the CasX variant protein comprises a higher Tm of the CasX variant protein relative to a reference CasX protein. In some embodiments, the Tm of the CasX variant protein is between about 20° C. to about 30° C., between about 30° C. to about 40° C., between about 40° C. to about 50° C., between about 50° C. to about 60° C., between about 60° C. to about 70° C., between about 70° C. to about 80° C., between about 80° C. to about 90° C. or between about 90° C. to about 100° C. Thermal stability is determined by measuring the “melting temperature” (Tm), which is defined as the temperature at which half of the molecules are denatured. Methods of measuring characteristics of protein stability such as Tm and the free energy of unfolding are known to persons of ordinary skill in the art, and can be measured using standard biochemical techniques in vitro. For example, Tm may be measured using Differential Scanning calorimetry, a thermo-analytical technique in which the difference in the amount of heat required to increase the temperature of a sample and a reference is measured as a function of temperature (Chen et al (2003) Pharm Res 20:1952-60; Ghirlando et al (1999) Immunol Lett 68:47-52). Alternatively, or in addition, CasX variant protein Tm may be measured using commercially available methods such as the ThermoFisher Protein Thermal Shift system. Alternatively, or in addition, circular dichroism may be used to measure the kinetics of folding and unfolding, as well as the Tm (Murray et al. (2002) J. Chromatogr Sci 40:343-9). Circular dichroism (CD) relies on the unequal absorption of left-handed and right-handed circularly polarized light by asymmetric molecules such as proteins. Certain structures of proteins, for example alpha-helices and beta-sheets, have characteristic CD spectra. Accordingly, in some embodiments, CD may be used to determine the secondary structure of a CasX variant protein.

[0246] In some embodiments, improved stability and/or thermostability of the CasX variant protein comprises improved folding kinetics of the CasX variant protein relative to a reference CasX protein. In some embodiments, folding kinetics of the CasX variant protein are improved relative to a reference CasX protein by at least about 5, at least about 10, at least about 50, at least about 100, at least about 500, at least about 1,000, at least about 2,000, at least about 3,000, at least about 4,000, at least about 5,000, or at least about a 10,000-fold improvement. In some embodiments, folding kinetics of the CasX variant protein are improved relative to a reference CasX protein by at least about 1 kJ/mol, at least about 5 kJ/mol, at least about 10 kJ/mol, at least about 20 kJ/mol, at least about 30 kJ/mol, at least about 40 kJ/mol, at least about 50 kJ/mol, at least about 60 kJ/mol, at least about 70 kJ/mol, at least about 80 kJ/mol, at least about 90 kJ/mol, at least about 100 kJ/mol, at least about 150 kJ/mol, at least about 200 kJ/mol, at least about 250 kJ/mol, at least about 300 kJ/mol, at least about 350 kJ/mol, at least about 400 kJ/mol, at least about 450 kJ/mol, or at least about 500 kJ/mol.

[0247] Exemplary amino acid changes that can increase the stability of a CasX variant protein relative to a reference CasX protein may include, but are not limited to, amino acid changes that increase the number of hydrogen bonds within the CasX variant protein, increase the number of disulfide bridges within the CasX variant protein, increase the number of salt bridges within the CasX variant protein, strengthen interactions between parts of the CasX variant protein, increase the buried hydrophobic surface area of the CasX variant protein, or any combinations thereof.

[0248] k. Protein Yield

[0249] In some embodiments, the disclosure provides a CasX variant protein having improved yield during expression and purification relative to a reference CasX protein. In some embodiments, the yield of CasX variant proteins purified from bacterial or eukaryotic host cells is improved relative to a reference CasX protein. In some embodiments, the bacterial host cells are Escherichia coli cells. In some embodiments, the eukaryotic cells are yeast, plant (e.g. tobacco), insect (e.g. Spodoptera frugiperda sf9 cells), mouse, rat, hamster, guinea pig, monkey, or human cells. In some embodiments, the eukaryotic host cells are mammalian cells, including, but not limited to HEK293 cells, BHK cells, NS0 cells, SP2/0 cells, YO myeloma cells, P3X63 mouse myeloma cells, PER cells, PER.C6 cells, hybridoma cells, NIH3T3 cells, COS, HeLa, or CHO cells.

[0250] In some embodiments, improved yield of the CasX variant protein is achieved through codon optimization. Cells use 64 different codons, 61 of which encode the 20 standard amino acids, while another 3 function as stop codons. In some cases, a single amino acid is encoded by more than one codon. Different organisms exhibit bias towards use of different codons for the same naturally occurring amino acid. Therefore, the choice of codons in a protein coding sequence, and matching codon choice to the organism in which the protein will be expressed, can, in some cases, significantly affect protein translation and therefore protein expression levels. In some embodiments, the CasX variant protein is encoded by a nucleic acid that has been codon optimized. In some embodiments, the nucleic acid encoding the CasX variant protein has been codon optimized for expression in a bacterial cell, a yeast cell, an insect cell, a plant cell, or a mammalian cell. In some embodiments, the mammal cell is a mouse, a rat, a hamster, a guinea pig, a monkey, or a human. In some embodiments, the CasX variant protein is encoded by a nucleic acid that has been codon optimized for expression in a human cell. In some embodiments, the CasX variant protein is encoded by a nucleic acid from which nucleotide sequences that reduce translation rates in prokaryotes and eukaryotes have been removed. For example, runs of greater than three thymine residues in a row can reduce translation rates in certain organisms or internal polyadenylation signals can reduce translation.

[0251] In some embodiments, improvements in solubility and stability, as described herein, result in improved yield of the CasX variant protein relative to a reference CasX protein.

[0252] Improved protein yield during expression and purification can be evaluated by methods known in the art. For example, the amount of CasX variant protein can be determined by running the protein on an SDS-page gel, and comparing the CasX variant protein to a either a control whose amount or concentration is known in advance to determine an absolute level of protein. Alternatively, or in addition, a purified CasX variant protein can be run on an SDS-page gel next to a reference CasX protein undergoing the same purification process to determine relative improvements in CasX variant protein yield. Alternatively, or in addition, levels of protein can be measured using immunohistochemical methods such as Western blot or ELISA with an antibody to CasX, or by HPLC. For proteins in solution, concentration can be determined by measuring of the protein's intrinsic UV absorbance, or by methods which use protein-dependent color changes such as the Lowry assay, the Smith copper/bicinchoninic assay or the Bradford dye assay. Such methods can be used to calculate the total protein (such as, for example, total soluble protein) yield obtained by expression under certain conditions. This can be compared, for example, to the protein yield of a reference CasX protein under similar expression conditions.

[0253] l. Protein Solubility

[0254] In some embodiments, a CasX variant protein has improved solubility relative to a reference CasX protein. In some embodiments, a CasX variant protein has improved solubility of the CasX:gNA ribonucleoprotein complex variant relative to a ribonucleoprotein complex comprising a reference CasX protein.

[0255] In some embodiments, an improvement in protein solubility leads to higher yield of protein from protein purification techniques such as purification from E. coli. Improved solubility of CasX variant proteins may, in some embodiments, enable more efficient activity in cells, as a more soluble protein may be less likely to aggregate in cells. Protein aggregates can in certain embodiments be toxic or burdensome on cells, and, without wishing to be bound by any theory, increased solubility of a CasX variant protein may ameliorate this result of protein aggregation. Further, improved solubility of CasX variant proteins may allow for enhanced formulations permitting the delivery of a higher effective dose of functional protein, for example in a desired gene editing application. In some embodiments, improved solubility of a CasX variant protein relative to a reference CasX protein results in improved yield of the CasX variant protein during purification of at least about 5, at least about 10, at least about 20, at least about 30, at least about 40, at least about 50, at least about 60, at least about 70, at least about 80, at least about 90, at least about 100, at least about 250, at least about 500, or at least about 1000-fold greater yield. In some embodiments, improved solubility of a CasX variant protein relative to a reference CasX protein improves activity of the CasX variant protein in cells by at least about 1.1, at least about 1.2, at least about 1.3, at least about 1.4, at least about 1.5, at least about 1.6, at least about 1.7, at least about 1.8, at least about 1.9, at least about 2, at least about 2.1, at least about 2.2, at least about 2.3, at least about 2.4, at least about 2.5, at least about 2.6, at least about 2.7, at least about 2.8, at least about 2.9, at least about 3, at least about 3.5, at least about 4, at least about 4.5, at least about 5, at least about 5.5, at least about 6, at least about 6.5, at least about 7.0, at least about 7.5, at least about 8, at least about 8.5, at least about 9, at least about 9.5, at least about 10, at least about 11, at least about 12, at least about 13, at least about 14, or at least about 15-fold greater activity.

[0256] Methods of measuring CasX protein solubility, and improvements thereof in CasX variant proteins, will be readily apparent to the person of ordinary skill in the art. For example, CasX variant protein solubility can in some embodiments be measured by taking densitometry readings on a gel of the soluble fraction of lysed E. coli. Alternatively, or addition, improvements in CasX variant protein solubility can be measured by measuring the maintenance of soluble protein product through the course of a full protein purification. For example, soluble protein product can be measured at one or more steps of gel affinity purification, tag cleavage, cation exchange purification, running the protein on a size exclusion chromatography (SEC) column. In some embodiments, the densitometry of every band of protein on a gel is read after each step in the purification process. CasX variant proteins with improved solubility may, in some embodiments, maintain a higher concentration at one or more steps in the protein purification process when compared to the reference CasX protein, while an insoluble protein variant may be lost at one or more steps due to buffer exchanges, filtration steps, interactions with a purification column, and the like.

[0257] In some embodiments, improving the solubility of CasX variant proteins results in a higher yield in terms of mg/L of protein during protein purification when compared to a reference CasX protein.

[0258] In some embodiments, improving the solubility of CasX variant proteins enables a greater amount of editing events compared to a less soluble protein when assessed in editing assays such as the EGFP disruption assays described herein.

[0259] m. Protein Affinity for the gNA

[0260] In some embodiments, a CasX variant protein has improved affinity for the gNA relative to a reference CasX protein, leading to the formation of the ribonucleoprotein complex. Increased affinity of the CasX variant protein for the gNA may, for example, result in a lower Kd for the generation of a RNP complex, which can, in some cases, result in a more stable ribonucleoprotein complex formation. In some embodiments, the Kd of a CasX variant protein for a gNA is increased relative to a reference CasX protein by a factor of at least about 1.1, at least about 1.2, at least about 1.3, at least about 1.4, at least about 1.5, at least about 1.6, at least about 1.7, at least about 1.8, at least about 1.9, at least about 2, at least about 3, at least about 4, at least about 5, at least about 6, at least about 7, at least about 8, at least about 9, at least about 10, at least about 15, at least about 20, at least about 25, at least about 30, at least about 35, at least about 40, at least about 45, at least about 50, at least about 60, at least about 70, at least about 80, at least about 90, or at least about 100. In some embodiments, the CasX variant has about 1.1 to about 10-fold increased binding affinity to the gNA compared to the reference CasX protein of SEQ ID NO: 2.

[0261] In some embodiments, increased affinity of the CasX variant protein for the gNA results in increased stability of the ribonucleoprotein complex when delivered to mammalian cells, including in vivo delivery to a subject. This increased stability can affect the function and utility of the complex in the cells of a subject, as well as result in improved pharmacokinetic properties in blood, when delivered to a subject. In some embodiments, increased affinity of the CasX variant protein, and the resulting increased stability of the ribonucleoprotein complex, allows for a lower dose of the CasX variant protein to be delivered to the subject or cells while still having the desired activity; for example in vivo or in vitro gene editing. The increased ability to form RNP and keep them in stable form can be assessed using assays such as the in vitro cleavage assays described in the Examples herein. In some embodiments, RNP comprising the CasX variants of the disclosure are able to achieve a K_{cleave} rate when complexed as an RNP that is at last 2-fold, at least 5-fold, or at least 10-fold higher compared to RNP comprising a reference CasX of SEQ ID NOS: 1-3.

[0262] In some embodiments, a higher affinity (tighter binding) of a CasX variant protein to a gNA allows for a greater amount of editing events when both the CasX variant protein and the gNA remain in an RNP complex. Increased editing events can be assessed using editing assays such as the EGFP disruption assay described herein.

[0263] Without wishing to be bound by theory, in some embodiments amino acid changes in the Helical I domain can increase the binding affinity of the CasX variant protein with the gNA targeting sequence, while changes in the Helical II domain can increase the binding affinity of the CasX variant protein with the gNA scaffold stem loop, and changes in the oligonucleotide binding domain (OBD) increase the binding affinity of the CasX variant protein with the gRNA triplex.

[0264] Methods of measuring CasX protein binding affinity for a CasX gNA include in vitro methods using purified CasX protein and gNA. The binding affinity for reference CasX and variant proteins can be measured by fluorescence polarization if the gNA or CasX protein is tagged with a fluorophore. Alternatively, or in addition, binding affinity can be measured by biolayer interferometry, electrophoretic mobility shift assays (EMSAs), or filter binding. Additional standard techniques to quantify absolute affinities of RNA binding proteins such as the reference CasX and variant proteins of the disclosure for specific gNAs such as reference gNAs and variants thereof include, but are not limited to, isothermal calorimetry (ITC), and surface plasmon resonance (SPR), as well as the methods of the Examples.

[0265] n. Affinity for Target Nucleic Acid

[0266] In some embodiments, a CasX variant protein has improved binding affinity for a target nucleic acid relative to the affinity of a reference CasX protein for a target nucleic acid. CasX variants with higher affinity for their target nucleic acid may, in some embodiments, cleave the target nucleic acid sequence more rapidly than a reference CasX protein that does not have increased affinity for the target nucleic acid.

[0267] In some embodiments, the improved affinity for the target nucleic acid comprises improved affinity for the target sequence or protospacer sequence of the target nucleic acid, improved affinity for the PAM sequence, an improved ability to search DNA for the target sequence, or any combinations thereof. Without wishing to be bound by theory, it is thought that CRISPR/Cas system proteins such as CasX may find their target sequences by one-dimension diffusion along a DNA molecule. The process is thought to include (1) binding of the ribonucleoprotein to the DNA molecule followed by (2) stalling at the target sequence, either of which may be, in some embodiments, affected by improved affinity of CasX proteins for a target nucleic acid sequence, thereby improving function of the CasX variant protein compared to a reference CasX protein.

[0268] In some embodiments, a CasX variant protein with improved target nucleic acid affinity has increased overall affinity for DNA. In some embodiments, a CasX variant protein with improved target nucleic acid affinity has increased affinity for or the ability to utilize specific PAM sequences other than the canonical TTC PAM recognized by the reference CasX protein of SEQ ID NO: 2, including PAM sequences selected from the group consisting of TTC, ATC, GTC, and CTC, thereby increasing the amount of target DNA that can be edited compared to wild-type CasX nucleases. Without wishing to be bound by theory, it is possible that these protein variants may interact more strongly with DNA overall and may have an increased ability to access and edit sequences within the target DNA due to the ability to utilize additional PAM sequences beyond those of wild-type reference CasX, thereby allowing for a more efficient search process of the CasX protein for the target sequence. A higher overall affinity for DNA also, in some embodiments, can increase the frequency at which a CasX protein can effectively start and finish a binding and unwinding step, thereby facilitating target strand invasion and R-loop formation, and ultimately the cleavage of a target nucleic acid sequence.

[0269] Without wishing to be bound by theory, it is possible that amino acid changes in the NTSBD that increase the efficiency of unwinding, or capture, of a non-target DNA strand in the unwound state, can increase the affinity of CasX variant proteins for target DNA. Alternatively, or in addition, amino acid changes in the NTSBD that increase the ability of the NTSBD to stabilize DNA during unwinding can increase the affinity of CasX variant proteins for target DNA. Alternatively, or in addition, amino acid changes in the OBD may increase the affinity of CasX variant protein binding to the protospacer adjacent motif (PAM), thereby increasing affinity of the CasX variant protein for the target nucleic acid sequence. Alternatively, or in addition, amino acid changes in the Helical I and/or II, RuvC and TSL domains that increase the affinity of the CasX variant protein for the target nucleic acid strand can increase the affinity of the CasX variant protein for the target nucleic acid sequence.

[0270] In some embodiments, the CasX variant protein has increased binding affinity to the target nucleic acid sequence compared to the reference protein of SEQ ID NO: 1, SEQ ID NO: 2, or SEQ ID NO: 3. In some embodiments, affinity of a CasX variant protein of the disclosure for a target nucleic acid molecule is increased relative to a reference CasX protein of SEQ ID NO: 1, SEQ ID NO: 2, or SEQ ID NO: 3 by a factor of at least about 1.1, at least about 1.2, at least about 1.3, at least about 1.4, at least about 1.5, at least about 1.6, at least about 1.7, at least about 1.8, at least about 1.9, at least about 2, at least about 3, at least about 4, at least about 5, at least about 6, at least about 7, at least about 8, at least about 9, at least about 10, at least about 15, at least about 20, at least about 25, at least about 30, at least about 35, at least about 40, at least about 45, at least about 50, at least about 60, at least about 70, at least about 80, at least about 90, or at least about 100.

[0271] In some embodiments, a CasX variant protein has improved binding affinity for the non-target strand of the target nucleic acid. As used herein, the term “non-target strand” refers to the strand of the DNA target nucleic acid sequence that does not form Watson and Crick base pairs with the targeting sequence in the gNA, and is complementary to the target DNA strand. In some embodiments, the CasX variant protein has about 1.1 to about 100-fold increased binding affinity to the non-target stand of the target nucleic acid compared to the reference protein of SEQ ID NO: 1, SEQ ID NO: 2, or SEQ ID NO: 3.

[0272] Methods of measuring CasX protein (such as reference or variant) affinity for a target nucleic acid molecule may include electrophoretic mobility shift assays (EMSAs), filter binding, isothermal calorimetry (ITC), and surface plasmon resonance (SPR), fluorescence polarization and biolayer interferometry (BLI). Further methods of measuring CasX protein affinity for a target include in vitro biochemical assays that measure DNA cleavage events over time.

[0273] o. Improved Specificity for a Target Site

[0274] In some embodiments, a CasX variant protein has improved specificity for a target nucleic acid sequence relative to a reference CasX protein of SEQ ID NOS: 1-3. As used herein, “specificity,” interchangeably referred to as “target specificity,” refers to the degree to which a CRISPR/Cas system ribonucleoprotein complex cleaves off-target sequences that are similar, but not identical to the target nucleic acid sequence; e.g., a CasX variant RNP with a higher degree of specificity would exhibit reduced off-target cleavage of sequences relative to a reference CasX protein. The specificity, and the reduction of potentially deleterious off-target effects, of CRISPR/Cas system proteins can be vitally important in order to achieve an acceptable therapeutic index for use in mammalian subjects.

[0275] In some embodiments, a CasX variant protein has improved specificity for a target site within the target sequence that is complementary to the targeting sequence of the gNA relative to a reference CasX protein of SEQ ID NOS: 1-3. Without wishing to be bound by theory, it is possible that amino acid changes in the helical I and II domains that increase the specificity of the CasX variant protein for the target nucleic acid strand can increase the specificity of the CasX variant protein for the target nucleic acid overall. In some embodiments, amino acid changes that increase specificity of CasX variant proteins for target nucleic acid may also result in decreased affinity of CasX variant proteins for DNA.

[0276] Methods of testing CasX protein (such as variant or reference) target specificity may include guide and Circularization for In vitro Reporting of Cleavage Effects by Sequencing (CIRCLE-seq), or similar methods. In brief, in CIRCLE-seq techniques, genomic DNA is sheared and circularized by ligation of stem-loop adapters, which are nicked in the stem-loop regions to expose 4 nucleotide palindromic overhangs. This is followed by intramolecular ligation and degradation of remaining linear DNA. Circular DNA molecules containing a CasX cleavage site are subsequently linearized with CasX, and adapter adapters are ligated to the exposed ends followed by high-throughput sequencing to generate paired end reads that contain information about the off-target site. Additional assays that can be used to detect off-target events, and therefore CasX protein specificity include assays used to detect and quantify indels (insertions and deletions) formed at those selected off-target sites such as mismatch-detection nuclease assays and next generation sequencing (NGS). Exemplary mismatch-detection assays include nuclease assays, in which genomic DNA from cells treated with CasX and sgNA is PCR amplified, denatured and rehybridized to form hetero-duplex DNA, containing one wild type strand and one strand with an indel. Mismatches are recognized and cleaved by mismatch detection nucleases, such as Surveyor nuclease or T7 endonuclease I.

[0277] p. Protospacer and PAM Sequences

[0278] Herein, the protospacer is defined as the DNA sequence complementary to the targeting sequence of the guide RNA and the DNA complementary to that sequence, referred to as the target strand and non-target strand, respectively. As used herein, the PAM is a nucleotide sequence located 5′ proximal to the protospacer that, in conjunction with the targeting sequence of the gNA, helps the orientation and positioning of the CasX for the potential cleavage of the protospacer strand(s).

[0279] PAM sequences may be degenerate, and specific RNP constructs may have different preferred and tolerated PAM sequences that support different efficiencies of cleavage. Following convention, unless stated otherwise, the disclosure refers to both the PAM and the protospacer sequence and their directionality according to the orientation of the non-target strand. This does not imply that the PAM sequence of the non-target strand, rather than the target strand, is determinative of cleavage or mechanistically involved in target recognition. For example, when reference is to a TTC PAM, it may in fact be the complementary GAA sequence that is required for target cleavage, or it may be some combination of nucleotides from both strands. In the case of the CasX proteins disclosed herein, the PAM is located 5′ of the protospacer with a single nucleotide separating the PAM from the first nucleotide of the protospacer. Thus, in the case of reference CasX, a TTC PAM should be understood to mean a sequence following the formula 5′- . . . NNTTCN(protospacer) . . . 3′ (SEQ ID NO: 218) where ‘N’ is any DNA nucleotide and ‘(protospacer)’ is a DNA sequence having identity with the targeting sequence of the guide RNA. In the case of a CasX variant with expanded PAM recognition, a TTC, CTC, GTC, or ATC PAM should be understood to mean a sequence following the formulae:

[0280] 5′- . . . NNTTCN(protospacer) . . . 3′ (SEQ ID NO: 218);

[0281] 5′- . . . NNCTCN(protospacer) . . . 3′ (SEQ ID NO: 219);

[0282] 5′- . . . NNGTCN(protospacer) . . . 3′ (SEQ ID NO: 220); or

[0283] 5′- . . . NNATCN(protospacer) . . . 3′ (SEQ ID NO: 221). Alternatively, a TC PAM should be understood to mean a sequence following the formula:

(SEQ ID NO: 222)
5′-. . . NNNTCN(protospacer)NNNNNN . . . 3′.

[0284] In some embodiments, a CasX variant has improved editing of a PAM sequence exhibits greater editing efficiency and/or binding of a target sequence in the target DNA when any one of the PAM sequences TTC, ATC, GTC, or CTC is located 1 nucleotide 5′ to the non-target strand of the protospacer having identity with the targeting sequence of the gNA in a cellular assay system compared to the editing efficiency and/or binding of an RNP comprising a reference CasX protein in a comparable assay system. In some embodiments, the PAM sequence is TTC. In some embodiments, the PAM sequence is ATC. In some embodiments, the PAM sequence is CTC. In some embodiments, the PAM sequence is GTC.

[0285] q. Unwinding of DNA

[0286] In some embodiments, a CasX variant protein has improved ability of unwinding DNA relative to a reference CasX protein. Poor dsDNA unwinding has been shown previously to impair or prevent the ability of CRISPR/Cas system proteins AnaCas9 or Cas14s to cleave DNA. Therefore, without wishing to be bound by any theory, it is likely that increased DNA cleavage activity by some CasX variant proteins of the disclosure is due, at least in part, to an increased ability to find and unwind the dsDNA at a target site. Methods of measuring the ability of CasX proteins (such as variant or reference) to unwind DNA include, but are not limited to, in vitro assays that observe increased on rates of dsDNA targets in fluorescence polarization or biolayer interferometry.

[0287] Without wishing to be bound by theory, it is thought that amino acid changes in the NTSB domain may produce CasX variant proteins with increased DNA unwinding characteristics. Alternatively, or in addition, amino acid changes in the OBD or the helical domain regions that interact with the PAM may also produce CasX variant proteins with increased DNA unwinding characteristics.

[0288] r. Catalytic Activity

[0289] The ribonucleoprotein complex of the CasX:gNA systems disclosed herein comprise a CasX variant protein that binds to a target nucleic acid sequence and cleaves the target nucleic acid sequence. In some embodiments, a CasX variant protein has improved catalytic activity relative to a reference CasX protein. Without wishing to be bound by theory, it is thought that in some cases cleavage of the target strand can be a limiting factor for Cas12-like molecules in creating a dsDNA break. In some embodiments, CasX variant proteins improve bending of the target strand of DNA and cleavage of this strand, resulting in an improvement in the overall efficiency of dsDNA cleavage by the CasX ribonucleoprotein complex.

[0290] In some embodiments, a CasX variant protein has increased nuclease activity compared to a reference CasX protein. Variants with increased nuclease activity can be generated, for example, through amino acid changes in the RuvC nuclease domain. In some embodiments, the CasX variant comprises a nuclease domain having nickase activity. In the foregoing, the CasX nickase of a CasX:gNA system generates a single-stranded break within 10-18 nucleotides 3′ of a PAM site in the non-target strand. In other embodiments, the CasX variant comprises a nuclease domain having double-stranded cleavage activity. In the foregoing, the CasX of the CasX:gNA system generates a double-stranded break within 18-26 nucleotides 5′ of a PAM site on the target strand and 10-18 nucleotides 3′ on the non-target strand. Nuclease activity can be assayed by a variety of methods, including those of the Examples. In some embodiments, a CasX variant has a Kcleave constant that is at least 2-fold, or at least 3-fold, or at least 4-fold, or at least 5-fold, or at least 6-fold, or at least 7-fold, or at least 8-fold, or at least 9-fold, or at least 10-fold greater compared to a reference CasX.

[0291] In some embodiments, a CasX variant protein has the improved characteristic of forming RNP with gNA that result in a higher percentage of cleavage-competent RNP compared to an RNP of a reference CasX protein of SEQ ID NO: 1, SEQ ID NO: 2, or SEQ ID NO: 3 and the gNA. By cleavage competent, it is meant that the RNP that is formed has the ability to cleave the target nucleic acid. In some embodiments, the RNP of the CasX variant and the gNA exhibit at least a 2-fold, or at least a 3-fold, or at least a 4-fold, or at least a 5-fold, or at least a 10-fold cleavage rate compared to an RNP of a reference CasX protein of SEQ ID NO: 1, SEQ ID NO: 2, or SEQ ID NO: 3 and the gNA.

[0292] In some embodiments, a CasX variant protein has increased target strand loading for double strand cleavage compared to a reference CasX. Variants with increased target strand loading activity can be generated, for example, through amino acid changes in the TLS domain.

[0293] Without wishing to be bound by theory, amino acid changes in the TSL domain may result in CasX variant proteins with improved catalytic activity. Alternatively, or in addition, amino acid changes around the binding channel for the RNA:DNA duplex may also improve catalytic activity of the CasX variant protein.

[0294] In some embodiments, a CasX variant protein has increased collateral cleavage activity compared to a reference CasX protein. As used herein, “collateral cleavage activity” refers to additional, non-targeted cleavage of nucleic acids following recognition and cleavage of a target nucleic acid sequence. In some embodiments, a CasX variant protein has decreased collateral cleavage activity compared to a reference CasX protein.

[0295] In some embodiments, for example those embodiments encompassing applications where cleavage of the target nucleic acid sequence is not a desired outcome, improving the catalytic activity of a CasX variant protein comprises altering, reducing, or abolishing the catalytic activity of the CasX variant protein. In some embodiments, a ribonucleoprotein complex comprising a dCasX variant protein binds to a target nucleic acid sequence and does not cleave the target nucleic acid.

[0296] In some embodiments, the CasX ribonucleoprotein complex comprising a CasX variant protein binds a target DNA but generates a single stranded nick in the target DNA. In some embodiments, particularly those embodiments wherein the CasX protein is a nickase, a CasX variant protein has decreased target strand loading for single strand nicking. Variants with decreased target strand loading may be generated, for example, through amino acid changes in the TSL domain.

[0297] Exemplary methods for characterizing the catalytic activity of CasX proteins may include, but are not limited to, in vitro cleavage assays, including those of the Examples, below. In some embodiments, electrophoresis of DNA products on agarose gels can interrogate the kinetics of strand cleavage.

[0298] s. Affinity for PCSK9 Target RNA

[0299] In some embodiments, a ribonucleoprotein complex comprising a reference CasX protein or variant thereof binds to a target PCSK9 DNA and cleaves the target nucleic acid sequence. In some embodiments, variants of a reference CasX protein increase the specificity of the CasX variant protein for a target PCSK9 RNA, and increase the activity of the CasX variant protein with respect to a target RNA when compared to the reference CasX protein. For example, CasX variant proteins can display increased binding affinity for target RNAs, or increased cleavage of target RNAs, when compared to reference CasX proteins. In some embodiments, a ribonucleoprotein complex comprising a CasX variant protein binds to a target RNA and/or cleaves the target RNA. In some embodiments, a CasX variant has at least about two-fold to about 10-fold increased binding affinity to the PCSK9 target RNA compared to the reference protein of SEQ ID NO: 1, SEQ ID NO: 2, or SEQ ID NO: 3.

[0300] t. Combinations of Mutations

[0301] The present disclosure provides Cas X variants that are a combination of mutations from separate CasX variant proteins. In some embodiments, any variant to any domain described herein can be combined with other variants described herein. In some embodiments, any variant within any domain described herein can be combined with other variants described herein, in the same domain. Combinations of different amino acid changes may in some embodiments produce new optimized variants whose function is further improved by the combination of amino acid changes. In some embodiments, the effect of combining amino acid changes on CasX protein function is linear. As used herein, a combination that is linear refers to a combination whose effect on function is equal to the sum of the effects of each individual amino acid change when assayed in isolation. In some embodiments, the effect of combining amino acid changes on CasX protein function is synergistic. As used herein, a combination of variants that is synergistic refers to a combination whose effect on function is greater than the sum of the effects of each individual amino acid change when assayed in isolation. In some embodiments, combining amino acid changes produces CasX variant proteins in which more than one function of the CasX protein has been improved relative to the reference CasX protein.

[0302] u. CasX Fusion Proteins

[0303] In some embodiments, the disclosure provides CasX proteins comprising a heterologous protein fused to the CasX. In other cases, the CasX is a CasX variant of any of the embodiments described herein.

[0304] In some embodiments, the CasX variant protein comprises any one of SEQ ID NOS: 49-160, 439, 441, 443, 445, 447-460, 472, 474, 476, 478, 480, 482, 484, 486, 488, or 490 fused to one or more proteins or domains thereof that has a different activity of interest, resulting in a fusion protein. For example, in some embodiments, the CasX variant protein is fused to a protein (or domain thereof) that inhibits transcription, modifies a target nucleic acid sequence, or modifies a polypeptide associated with a nucleic acid (e.g., histone modification).

[0305] In some embodiments, a heterologous polypeptide (or heterologous amino acid such as a cysteine residue or a non-natural amino acid) can be inserted at one or more positions within a CasX protein to generate a CasX fusion protein. In other embodiments, a cysteine residue can be inserted at one or more positions within a CasX protein followed by conjugation of a heterologous polypeptide described below. In some alternative embodiments, a heterologous polypeptide or heterologous amino acid can be added at the N- or C-terminus of the CasX variant protein. In other embodiments, a heterologous polypeptide or heterologous amino acid can be inserted internally within the sequence of the CasX protein.

[0306] In some embodiments, the CasX variant fusion protein retains RNA-guided sequence specific target nucleic acid binding and cleavage activity. In some cases, the CasX variant fusion protein has (retains) 50% or more of the activity (e.g., cleavage and/or binding activity) of the corresponding CasX variant protein that does not have the insertion of the heterologous protein. In some cases, the CasX variant fusion protein retains at least about 60%, or at least about 70% or more, at least about 80%, or at least about 90%, or at least about 92%, or at least about 95%, or at least about 98%, or at least about 100% of the activity (e.g., cleavage and/or binding activity) of the corresponding CasX protein that does not have the insertion of the heterologous protein.

[0307] In some cases, the CasX variant fusion protein retains (has) target nucleic acid binding activity relative to the activity of the CasX protein without the inserted heterologous amino acid or heterologous polypeptide. In some cases, the CasX variant fusion protein retains at least about 60%, or at least about 70% or more, at least about 80%, or at least about 90%, or at least about 92%, or at least about 95%, or at least about 98%, or at least about 100% of the binding activity of the corresponding CasX protein that does not have the insertion of the heterologous protein.

[0308] In some cases, the CasX variant fusion protein retains (has) target nucleic acid binding and/or cleavage activity relative to the activity of the parent CasX protein without the inserted heterologous amino acid or heterologous polypeptide. For example, in some cases, the CasX variant fusion protein has (retains) 50% or more of the binding and/or cleavage activity of the corresponding parent CasX protein (the CasX protein that does not have the insertion). For example, in some cases, the CasX variant fusion protein has (retains) 60% or more (70% or more, 80% or more, 90% or more, 92% or more, 95% or more, 98% or more, or 100%) of the binding and/or cleavage activity of the corresponding CasX parent protein (the CasX protein that does not have the insertion). Methods of measuring cleaving and/or binding activity of a CasX protein and/or a CasX fusion protein will be known to one of ordinary skill in the art and any convenient method can be used.

[0309] A variety of heterologous polypeptides are suitable for inclusion in a reference CasX or CasX variant fusion protein of the disclosure. In some cases, the fusion partner can modulate transcription (e.g., inhibit transcription, increase transcription) of a target DNA. For example, in some cases the fusion partner is a protein (or a domain from a protein) that inhibits transcription (e.g., a transcriptional repressor, a protein that functions via recruitment of transcription inhibitor proteins, modification of target DNA such as methylation, recruitment of a DNA modifier, modulation of histones associated with target DNA, recruitment of a histone modifier such as those that modify acetylation and/or methylation of histones, and the like). In some cases the fusion partner is a protein (or a domain from a protein) that increases transcription (e.g., a transcription activator, a protein that acts via recruitment of transcription activator proteins, modification of target DNA such as demethylation, recruitment of a DNA modifier, modulation of histones associated with target DNA, recruitment of a histone modifier such as those that modify acetylation and/or methylation of histones, and the like).

[0310] In some cases, a fusion partner has enzymatic activity that modifies a target nucleic acid sequence; e.g., nuclease activity, methyltransferase activity, demethylase activity, DNA repair activity, DNA damage activity, deamination activity, dismutase activity, alkylation activity, depurination activity, oxidation activity, pyrimidine dimer forming activity, integrase activity, transposase activity, recombinase activity, polymerase activity, ligase activity, helicase activity, photolyase activity or glycosylase activity. In some embodiments, a CasX variant comprises any one of SEQ ID NOS: 49-160, 439, 441, 443, 445, 447-460, 472, 474, 476, 478, 480, 482, 484, 486, 488, or 490 and a polypeptide with methyltransferase activity, demethylase activity, acetyltransferase activity, deacetylase activity, kinase activity, phosphatase activity, ubiquitin ligase activity, deubiquitinating activity, adenylation activity, deadenylation activity, SUMOylating activity, deSUMOylating activity, ribosylation activity, deribosylation activity, myristoylation activity or demyristoylation activity.

[0311] In some embodiments, a CasX variant comprises any one of SEQ ID NOS: 49-160, 439, 441, 443, 445, 447-460, 472, 474, 476, 478, 480, 482, 484, 486, 488, or 490 and a fusion partner having enzymatic activity that modifies a polypeptide (e.g., a histone) associated with a target nucleic acid (e.g., methyltransferase activity, demethylase activity, acetyltransferase activity, deacetylase activity, kinase activity, phosphatase activity, ubiquitin ligase activity, deubiquitinating activity, adenylation activity, deadenylation activity, SUMOylating activity, deSUMOylating activity, ribosylation activity, deribosylation activity, myristoylation activity or demyristoylation activity).

[0312] Examples of proteins (or fragments thereof) that can be used as a fusion partner to increase transcription include but are not limited to: transcriptional activators such as VP16, VP64, VP48, VP160, p65 subdomain (e.g., from NFkB), and activation domain of EDLL and/or TAL activation domain (e.g., for activity in plants); histone lysine methyltransferases such as SET1A, SET1B, MLL1 to 5, ASH1, SYMD2, NSD1, and the like; histone lysine demethylases such as JHDM2a/b, UTX, JMJD3, and the like; histone acetyltransferases such as GCNS, PCAF, CBP, p300, TAF1, TIP60/PLIP, MOZ/MYST3, MORF/MYST4, SRC1, ACTR, P160, CLOCK, and the like; and DNA demethylases such as Ten-Eleven Translocation (TET) dioxygenase 1 (TET1CD), TET 1, DME, DML1, DML2, ROS1, and the like.

[0313] Examples of proteins (or fragments thereof) that can be used as a fusion partner to decrease transcription include but are not limited to: transcriptional repressors such as the Kruppel associated box (KRAB or SKD); KOX1 repression domain; the Mad mSIN3 interaction domain (SID); the ERF repressor domain (ERD), the SRDX repression domain (e.g., for repression in plants), and the like; histone lysine methyltransferases such as Pr-SET7/8, SUV4-20H1, RIZ1, and the like; histone lysine demethylases such as JMJD2A/JHDM3A, JMJD2B, JMJD2C/GASC1, JMJD2D, JARID1A/RBP2, JARID1B/PLU-1, JARID 1C/SMCX, JARID1D/SMCY, and the like; histone lysine deacetylases such as HDAC1, HDAC2, HDAC3, HDAC8, HDAC4, HDAC5, HDAC7, HDAC9, SIRT1, SIRT2, HDAC11, and the like; DNA methylases such as HhaI DNA m5c-methyltransferase (M.HhaI), DNA methyltransferase 1 (DNMT1), DNA methyltransferase 3a (DNMT3a), DNA methyltransferase 3b (DNMT3b), METI, DRM3 (plants), ZMET2, CMT1, CMT2 (plants), and the like; and periphery recruitment elements such as Lamin A, Lamin B, and the like.

[0314] In some cases, the fusion partner to a CasX variant comprises of any one of SEQ ID NOS: 49-160, 439, 441, 443, 445, 447-460, 472, 474, 476, 478, 480, 482, 484, 486, 488, or 490 has enzymatic activity that modifies the target nucleic acid sequence (e.g., ssRNA, dsRNA, ssDNA, dsDNA). Examples of enzymatic activity that can be provided by the fusion partner include but are not limited to: nuclease activity such as that provided by a restriction enzyme (e.g., FokI nuclease), methyltransferase activity such as that provided by a methyltransferase (e.g., HhaI DNA m5c-methyltransferase (M.HhaI), DNA methyltransferase 1 (DNMT1), DNA methyltransferase 3a (DNMT3a), DNA methyltransferase 3b (DNMT3b), METI, DRM3 (plants), ZMET2, CMT1, CMT2 (plants), and the like); demethylase activity such as that provided by a demethylase (e.g., Ten-Eleven Translocation (TET) dioxygenase 1 (TET 1 CD), TET1, DME, DML1, DML2, ROS1, and the like), DNA repair activity, DNA damage activity, deamination activity such as that provided by a deaminase (e.g., a cytosine deaminase enzyme, e.g., an APOBEC protein such as rat APOBEC1), dismutase activity, alkylation activity, depurination activity, oxidation activity, pyrimidine dimer forming activity, integrase activity such as that provided by an integrase and/or resolvase (e.g., Gin invertase such as the hyperactive mutant of the Gin invertase, GinH106Y; human immunodeficiency virus type 1 integrase (IN); Tn3 resolvase; and the like), transposase activity, recombinase activity such as that provided by a recombinase (e.g., catalytic domain of Gin recombinase), polymerase activity, ligase activity, helicase activity, photolyase activity, and glycosylase activity).

[0315] In some cases, a CasX variant protein of the present disclosure is fused to a polypeptide selected from a domain for increasing transcription (e.g., a VP16 domain, a VP64 domain), a domain for decreasing transcription (e.g., a KRAB domain, e.g., from the Kox1 protein), a core catalytic domain of a histone acetyltransferase (e.g., histone acetyltransferase p300), a protein/domain that provides a detectable signal (e.g., a fluorescent protein such as GFP), a nuclease domain (e.g., a Fokl nuclease), or a base editor (e.g., cytidine deaminase such as APOBEC1).

[0316] In some embodiments, a CasX variant comprises any one of SEQ ID NOS: 49-160, 439, 441, 443, 445, 447-460, 472, 474, 476, 478, 480, 482, 484, 486, 488, or 490 and a fusion partner having enzymatic activity that modifies a protein associated with the target nucleic acid (e.g., ssRNA, dsRNA, ssDNA, dsDNA) (e.g., a histone, an RNA binding protein, a DNA binding protein, and the like). Examples of enzymatic activity (that modifies a protein associated with a target nucleic acid) that can be provided by the fusion partner include but are not limited to: methyltransferase activity such as that provided by a histone methyltransferase (HMT) (e.g., suppressor of variegation 3-9 homolog 1 (SUV39H1, also known as KMT1A), euchromatic histone lysine methyltransferase 2 (G9A, also known as KMT1C and EHMT2), SUV39H2, ESET/SETDB 1, and the like, SET1A, SET1B, MLL1 to 5, ASH1, SYMD2, NSD1, DOT1L, Pr-SET7/8, SUV4-20H1, EZH2, RIZ1), demethylase activity such as that provided by a histone demethylase (e.g., Lysine Demethylase 1A (KDM1A also known as LSD1), JHDM2a/b, JMJD2A/JHDM3A, JMJD2B, JMJD2C/GASC1, JMJD2D, JARID1A/RBP2, JARID1B/PLU-1, JARID1C/SMCX, JARID1D/SMCY, UTX, JMJD3, and the like), acetyltransferase activity such as that provided by a histone acetylase transferase (e.g., catalytic core/fragment of the human acetyltransferase p300, GCNS, PCAF, CBP, TAF1, TIP60/PLIP, MOZ/MYST3, MORF/MYST4, HB01/MYST2, HMOF/MYST1, SRC1, ACTR, P160, CLOCK, and the like), deacetylase activity such as that provided by a histone deacetylase (e.g., HDAC1, HDAC2, HDAC3, HDAC8, HDAC4, HDAC5, HDAC7, HDAC9, SIRT1, SIRT2, HDAC11, and the like), kinase activity, phosphatase activity, ubiquitin ligase activity, deubiquitinating activity, adenylation activity, deadenylation activity, SUMOylating activity, deSUMOylating activity, ribosylation activity, deribosylation activity, myristoylation activity, and demyristoylation activity.

[0317] Additional examples of suitable fusion partners for a CasX variant are (i) a dihydrofolate reductase (DHFR) destabilization domain (e.g., to generate a chemically controllable subject RNA-guided polypeptide or a conditionally active RNA-guided polypeptide), and (ii) a chloroplast transit peptide.

[0318] In some embodiments, a CasX variant comprises any one of SEQ ID NOS: 49-160, 439, 441, 443, 445, 447-460, 472, 474, 476, 478, 480, 482, 484, 486, 488, or 490 and a chloroplast transit peptide including, but are not limited to:

(SEQ ID NO: 31)
MASMISSSAVTTVSRASRGQSAAMAPFGGLKSMTGFPVRKVNTDITSIT
SNGGRVKCMQVWPPIGKKKFETLSYLPPLTRDSRA;
(SEQ ID NO: 304)
MASMISSSAVTTVSRASRGQSAAMAPFGGLKSMTGFPVRKVNTDITSIT
SNGGRVKS;
(SEQ ID NO: 13863)
MASSMLSSATMVASPAQATMVAPFNGLKSSAAFPATRKANNDITSITSN
GGRVNCMQVWPPIEKKKFETLSYLPDLTDSGGRVNC;
(SEQ ID NO: 305)
MAQVSRICNGVQNPSLISNLSKSSQRKSPLSVSLKTQQHPRAYPISSSW
GLKKSGMTLIGSELRPLKVMSSVSTAC;
(SEQ ID NO: 306)
MAQVSRICNGVWNPSLISNLSKSSQRKSPLSVSLKTQQHPRAYPISSSW
GLKKSGMTLIGSELRPLKVMSSVSTAC;
(SEQ ID NO: 307)
MAQINNMAQGIQTLNPNSNFHKPQVPKSSSFLVFGSKKLKNSANSMLVL
KKDSIFMQLFCSFRISASVATAC;
(SEQ ID NO: 308)
MAALVTSQLATSGTVLSVTDRFRRPGFQGLRPRNPADAALGMRTVGASA
APKQSRKPHRFDRRCLSMVV;
(SEQ ID NO: 309)
MAALTTSQLATSATGFGIADRSAPSSLLRHGFQGLKPRSPAGGDATSLS
VTTSARATPKQQRSVQRGSRRFPSVVVC;
(SEQ ID NO: 310)
MASSVLSSAAVATRSNVAQANMVAPFTGLKSAASFPVSRKQNLDITSIA
SNGGRVQC;
(SEQ ID NO: 13864)
MESLAATSVFAPSRVAVPAARALVRAGTVVPTRRTSSTSGTSGVKCSAA
VTPQASPVISRSAAAA;
and
(SEQ ID NO: 311)
MGAAATSMQSLKFSNRLVPPSRRLSPVPNNVTCNNLPKSAAPVRTVKCCA
SSWNSTINGAAATTNGASAASS.

[0319] In some cases, a CasX variant protein of the present disclosure can include an endosomal escape peptide. In some cases, an endosomal escape polypeptide comprises the amino acid sequence GLFXALLXLLXSLWXLLLXA (SEQ ID NO: 312), wherein each X is independently selected from lysine, histidine, and arginine. In some cases, an endosomal escape polypeptide comprises the amino acid sequence GLFHALLHLLHSLWHLLLHA (SEQ ID NO: 313), or HHHHHHHHH (SEQ ID NO: 314).

[0320] Non-limiting examples of fusion partners for use with CasX variant proteins when targeting ssRNA target nucleic acid sequences include (but are not limited to): splicing factors (e.g., RS domains); protein translation components (e.g., translation initiation, elongation, and/or release factors; e.g., eIF4G); RNA methylases; RNA editing enzymes (e.g., RNA deaminases, e.g., adenosine deaminase acting on RNA (ADAR), including A to I and/or C to U editing enzymes); helicases; RNA-binding proteins; and the like. It is understood that a heterologous polypeptide can include the entire protein or in some cases can include a fragment of the protein (e.g., a functional domain).

[0321] In some embodiments, a CasX variant comprises any one of SEQ ID NOS: 49-160, 439, 441, 443, 445, 447-460, 472, 474, 476, 478, 480, 482, 484, 486, 488, or 490 comprises a fusion partner of any domain capable of interacting with ssRNA (which, for the purposes of this disclosure, includes intramolecular and/or intermolecular secondary structures, e.g., double-stranded RNA duplexes such as hairpins, stem-loops, etc.), whether transiently or irreversibly, directly or indirectly, including but not limited to an effector domain selected from the group comprising; endonucleases (for example RNase III, the CRR22 DYW domain, Dicer, and PIN (PilT N-terminus) domains from proteins such as SMGS and SMG6); proteins and protein domains responsible for stimulating RNA cleavage (for example CPSF, CstF, CFIm and CFIIm); exonucleases (for example XRN-1 or Exonuclease T); deadenylases (for example HNT3); proteins and protein domains responsible for nonsense mediated RNA decay (for example UPF1, UPF2, UPF3, UPF3b, RNP SI, Y14, DEK, REF2, and SRm160); proteins and protein domains responsible for stabilizing RNA (for example PABP); proteins and protein domains responsible for repressing translation (for example Ago2 and Ago4); proteins and protein domains responsible for stimulating translation (for example Staufen); proteins and protein domains responsible for (e.g., capable of) modulating translation (e.g., translation factors such as initiation factors, elongation factors, release factors, etc., e.g., eIF4G); proteins and protein domains responsible for polyadenylation of RNA (for example PAP1, GLD-2, and Star-PAP); proteins and protein domains responsible for polyuridinylation of RNA (for example CI Dl and terminal uridylate transferase); proteins and protein domains responsible for RNA localization (for example from IMP1, ZBP1, She2p, She3p, and Bicaudal-D); proteins and protein domains responsible for nuclear retention of RNA (for example Rrp6); proteins and protein domains responsible for nuclear export of RNA (for example TAP, NXF1, THO, TREX, REF, and Aly); proteins and protein domains responsible for repression of RNA splicing (for example PTB, Sam68, and hnRNP Al); proteins and protein domains responsible for stimulation of RNA splicing (for example serine/arginine-rich (SR) domains); proteins and protein domains responsible for reducing the efficiency of transcription (for example FUS (TLS)); and proteins and protein domains responsible for stimulating transcription (for example CDK7 and HIV Tat). Alternatively, the effector domain may be selected from the group comprising endonucleases; proteins and protein domains capable of stimulating RNA cleavage; exonucleases; deadenylases; proteins and protein domains having nonsense mediated RNA decay activity; proteins and protein domains capable of stabilizing RNA; proteins and protein domains capable of repressing translation; proteins and protein domains capable of stimulating translation; proteins and protein domains capable of modulating translation (e.g., translation factors such as initiation factors, elongation factors, release factors, etc., e.g., eIF4G); proteins and protein domains capable of polyadenylation of RNA; proteins and protein domains capable of polyuridinylation of RNA; proteins and protein domains having RNA localization activity; proteins and protein domains capable of nuclear retention of RNA; proteins and protein domains having RNA nuclear export activity; proteins and protein domains capable of repression of RNA splicing; proteins and protein domains capable of stimulation of RNA splicing; proteins and protein domains capable of reducing the efficiency of transcription; and proteins and protein domains capable of stimulating transcription. Another suitable heterologous polypeptide is a PUF RNA-binding domain, which is described in more detail in WO2012068627, which is hereby incorporated by reference in its entirety.

[0322] Some RNA splicing factors that can be used (in whole or as fragments thereof) as a fusion partner with a CasX variant have modular organization, with separate sequence-specific RNA binding modules and splicing effector domains. For example, members of the serine/arginine-rich (SR) protein family contain N-terminal RNA recognition motifs (RRMs) that bind to exonic splicing enhancers (ESEs) in pre-mRNAs and C-terminal RS domains that promote exon inclusion. As another example, the hnRNP protein hnRNP Al binds to exonic splicing silencers (ESSs) through its RRM domains and inhibits exon inclusion through a C-terminal glycine-rich domain. Some splicing factors can regulate alternative use of splice site (ss) by binding to regulatory sequences between the two alternative sites. For example, ASF/SF2 can recognize ESEs and promote the use of intron proximal sites, whereas hnRNP Al can bind to ESSs and shift splicing towards the use of intron distal sites. One application for such factors is to generate ESFs that modulate alternative splicing of endogenous genes, particularly disease associated genes. For example, Bcl-x pre-mRNA produces two splicing isoforms with two alternative 5′ splice sites to encode proteins of opposite functions. The long splicing isoform Bcl-xL is a potent apoptosis inhibitor expressed in long-lived post mitotic cells and is up-regulated in many cancer cells, protecting cells against apoptotic signals. The short isoform Bcl-xS is a pro-apoptotic isoform and expressed at high levels in cells with a high turnover rate (e.g., developing lymphocytes). The ratio of the two Bcl-x splicing isoforms is regulated by multiple cc-elements that are located in either the core exon region or the exon extension region (i.e., between the two alternative 5′ splice sites). For more examples, see WO2010075303, which is hereby incorporated by reference in its entirety.

[0323] Further suitable fusion partners for use with a CasX variant include, but are not limited to proteins (or fragments thereof) that are boundary elements (e.g., CTCF), proteins and fragments thereof that provide periphery recruitment (e.g., Lamin A, Lamin B, etc.), and protein docking elements (e.g., FKBP/FRB, Pill/Abyl, etc.).

[0324] In some cases, a heterologous polypeptide (a fusion partner) for use with a CasX variant provides for subcellular localization, i.e., the heterologous polypeptide contains a subcellular localization sequence (e.g., a nuclear localization signal (NLS) for targeting to the nucleus, a sequence to keep the fusion protein out of the nucleus, e.g., a nuclear export sequence (NES), a sequence to keep the fusion protein retained in the cytoplasm, a mitochondrial localization signal for targeting to the mitochondria, a chloroplast localization signal for targeting to a chloroplast, an ER retention signal, and the like). In some embodiments, a subject RNA-guided polypeptide or a conditionally active RNA-guided polypeptide and/or subject CasX fusion protein does not include a NLS so that the protein is not targeted to the nucleus (which can be advantageous, e.g., when the target nucleic acid sequence is an RNA that is present in the cytosol). In some embodiments, a fusion partner can provide a tag (i.e., the heterologous polypeptide is a detectable label) for ease of tracking and/or purification (e.g., a fluorescent protein, e.g., green fluorescent protein (GFP), yellow fluorescent protein (YFP), red fluorescent protein (RFP), cyan fluorescent protein (CFP), mCherry, tdTomato, and the like; a histidine tag, e.g., a 6×His tag; a hemagglutinin (HA) tag; a FLAG tag; a Myc tag; and the like).

[0325] In some cases, a CasX variant protein includes (is fused to) a nuclear localization signal (NLS). In some cases, a CasX variant protein is fused to 2 or more, 3 or more, 4 or more, or 5 or more 6 or more, 7 or more, 8 or more NLSs. In some cases, one or more NLSs (2 or more, 3 or more, 4 or more, or 5 or more NLSs) are positioned at or near (e.g., within 50 amino acids of) the N-terminus and/or the C-terminus. In some cases, one or more NLSs (2 or more, 3 or more, 4 or more, or 5 or more NLSs) are positioned at or near (e.g., within 50 amino acids of) the N-terminus of the CasX variant. In some cases, one or more NLSs (2 or more, 3 or more, 4 or more, or 5 or more NLSs) are positioned at or near (e.g., within 50 amino acids of) the C-terminus of the CasX variant. In some cases, one or more NLSs (3 or more, 4 or more, or 5 or more NLSs) are positioned at or near (e.g., within 50 amino acids of) both the N-terminus and the C-terminus. In some cases, an NLS is positioned at the N-terminus and an NLS is positioned at the C-terminus. In some cases, a reference or CasX variant protein includes (is fused to) between 1 and 10 NLSs (e.g., 1-9, 1-8, 1-7, 1-6, 1-5, 2-10, 2-9, 2-8, 2-7, 2-6, or 2-5 NLSs). In some cases, a reference or CasX variant protein includes (is fused to) between 2 and 5 NLSs (e.g., 2-4, or 2-3 NLSs).

[0326] Non-limiting examples of NLSs include sequences derived from: the NLS of the SV40 virus large T-antigen, having the amino acid sequence PKKKRKV (SEQ ID NO: 217); the NLS from nucleoplasmin (e.g., the nucleoplasmin bipartite NLS with the sequence KRPAATKKAGQAKKKK (SEQ ID NO: 223); the c-myc NLS having the amino acid sequence PAAKRVKLD (SEQ ID NO: 224) or RQRRNELKRSP (SEQ ID NO: 161); the hRNPA1 M9 NLS having the sequence NQSSNFGPMKGGNFGGRSSGPYGGGGQYFAKPRNQGGY (SEQ ID NO: 162); the sequence RMRIZFKNKGKDTAELRRRRVEVSVELRKAKKDEQILKRRNV (SEQ ID NO: 163) of the IBB domain from importin-alpha; the sequences VSRKRPRP (SEQ ID NO: 164) and PPKKARED (SEQ ID NO: 165) of the myoma T protein; the sequence PQPKKKPL (SEQ ID NO: 166) of human p53; the sequence SALIKKKKKMAP (SEQ ID NO: 167) of mouse c-abl IV; the sequences DRLRR (SEQ ID NO: 168) and PKQKKRK (SEQ ID NO: 169) of the influenza virus NS1; the sequence RKLKKKIKKL (SEQ ID NO: 170) of the Hepatitis virus delta antigen; the sequence REKKKFLKRR (SEQ ID NO: 171) of the mouse Mxl protein; the sequence KRKGDEVDGVDEVAKKKSKK (SEQ ID NO: 172) of the human poly(ADP-ribose) polymerase; the sequence RKCLQAGMNLEARKTKK (SEQ ID NO: 173) of the steroid hormone receptors (human) glucocorticoid; the sequence PRPRKIPR (SEQ ID NO: 174) of Borna disease virus P protein (BDV-P1); the sequence PPRKKRTVV (SEQ ID NO: 175) of hepatitis C virus nonstructural protein (HCV-NS5A); the sequence NLSKKKKRKREK (SEQ ID NO: 176) of LEF1; the sequence RRPSRPFRKP (SEQ ID NO: 177) of ORF57 simirae; the sequence KRPRSPSS (SEQ ID NO: 178) of EBV LANA; the sequence KRGINDRNFWRGENERKTR (SEQ ID NO: 179) of Influenza A protein; the sequence PRPPKMARYDN (SEQ ID NO: 180) of human RNA helicase A (RHA); the sequence KRSFSKAF (SEQ ID NO: 181) of nucleolar RNA helicase II; the sequence KLKIKRPVK (SEQ ID NO: 182) of TUS-protein; the sequence PKKKRKVPPPPAAKRVKLD (SEQ ID NO: 183) associated with importin-alpha; the sequence PKTRRRPRRSQRKRPPT (SEQ ID NO: 184) from the Rex protein in HTLV-1; the sequence MSRRRKANPTKLSENAKKLAKEVEN (SEQ ID NO: 185) from the EGL-13 protein of Caenorhabditis elegans; and the sequences KTRRRPRRSQRKRPPT (SEQ ID NO: 186), RRKKRRPRRKKRR (SEQ ID NO: 187), PKKKSRKPKKKSRK (SEQ ID NO: 188), HKKKHPDASVNFSEFSK (SEQ ID NO: 189), QRPGPYDRPQRPGPYDRP (SEQ ID NO: 190), LSPSLSPLLSPSLSPL (SEQ ID NO: 191), RGKGGKGLGKGGAKRHRK (SEQ ID NO: 192), PKRGRGRPKRGRGR (SEQ ID NO: 193), PKKKRKVPPPPAAKRVKLD (SEQ ID NO: 183) and PKKKRKVPPPPKKKRKV (SEQ ID NO: 194). In general, NLS (or multiple NLSs) are of sufficient strength to drive accumulation of a reference or CasX variant fusion protein in the nucleus of a eukaryotic cell. Detection of accumulation in the nucleus may be performed by any suitable technique. For example, a detectable marker may be fused to a reference or CasX variant fusion protein such that location within a cell may be visualized. Cell nuclei may also be isolated from cells, the contents of which may then be analyzed by any suitable process for detecting protein, such as immunohistochemistry, Western blot, or enzyme activity assay. Accumulation in the nucleus may also be determined.

[0327] In some cases, a CasX variant fusion protein includes a “Protein Transduction Domain” or PTD (also known as a CPP—cell penetrating peptide), which refers to a protein, polynucleotide, carbohydrate, or organic or inorganic compound that facilitates traversing a lipid bilayer, micelle, cell membrane, organelle membrane, or vesicle membrane. A PTD attached to another molecule, which can range from a small polar molecule to a large macromolecule and/or a nanoparticle, facilitates the molecule traversing a membrane, for example going from an extracellular space to an intracellular space, or from the cytosol to within an organelle. In some embodiments, a PTD is covalently linked to the amino terminus of a CasX variant fusion protein. In some embodiments, a PTD is covalently linked to the carboxyl terminus of a CasX variant fusion protein. In some cases, the PTD is inserted internally in the sequence of a CasX variant fusion protein at a suitable insertion site. In some cases, a CasX variant fusion protein includes (is conjugated to, is fused to) one or more PTDs (e.g., two or more, three or more, four or more PTDs). In some cases, a PTD includes one or more nuclear localization signals (NLS). Examples of PTDs include but are not limited to peptide transduction domain of HIV TAT comprising YGRKKRRQRRR (SEQ ID NO: 195), RKKRRQRR (SEQ ID NO: 196); YARAAARQARA (SEQ ID NO: 197); THRLPRRRRRR (SEQ ID NO: 198); and GGRRARRRRRR (SEQ ID NO: 199); a polyarginine sequence comprising a number of arginines sufficient to direct entry into a cell (e.g., 3, 4, 5, 6, 7, 8, 9, 10, or 10-50 arginines (SEQ ID NO: 200)); a VP22 domain (Zender et al. (2002) Cancer Gene Ther. 9(6):489-96); an Drosophila Antennapedia protein transduction domain (Noguchi et al. (2003) Diabetes 52(7): 1732-1737); a truncated human calcitonin peptide (Trehin et al. (2004) Pharm. Research 21 :1248-1256); polylysine (Wender et al. (2000) Proc. Natl. Acad. Sci. USA 97: 13003-13008); RRQRRTSKLMKR (SEQ ID NO: 201); Transportan GWTLNSAGYLLGKINLKALAALAKKIL (SEQ ID NO: 202); KALAWEAKLAKALAKALAKHLAKALAKALKCEA (SEQ ID NO: 203); and RQIKIWFQNRRMKWKK (SEQ ID NO: 204). In some embodiments, the PTD is an activatable CPP (ACPP) (Aguilera et al. (2009) Integr Biol (Camb) June; 1(5-6): 371-381). ACPPs comprise a polycationic CPP (e.g., Arg9 or “R9”) connected via a cleavable linker to a matching polyanion (e.g., Glu9 or “E9”), which reduces the net charge to nearly zero and thereby inhibits adhesion and uptake into cells. Upon cleavage of the linker, the polyanion is released, locally unmasking the polyarginine and its inherent adhesiveness, thus “activating” the ACPP to traverse the membrane.

[0328] In some embodiments, a CasX variant fusion protein can include a CasX protein that is linked to an internally inserted heterologous amino acid or heterologous polypeptide (a heterologous amino acid sequence) via a linker polypeptide (e.g., one or more linker polypeptides). In some embodiments, a CasX variant fusion protein can be linked at the C-terminal and/or N-terminal end to a heterologous polypeptide (fusion partner) via a linker polypeptide (e.g., one or more linker polypeptides). The linker polypeptide may have any of a variety of amino acid sequences. Proteins can be joined by a spacer peptide, generally of a flexible nature, although other chemical linkages are not excluded. Suitable linkers include polypeptides of between 4 amino acids and 40 amino acids in length, or between 4 amino acids and 25 amino acids in length. These linkers are generally produced by using synthetic, linker-encoding oligonucleotides to couple the proteins. Peptide linkers with a degree of flexibility can be used. The linking peptides may have virtually any amino acid sequence, bearing in mind that the preferred linkers will have a sequence that results in a generally flexible peptide. The use of small amino acids, such as glycine and alanine, are of use in creating a flexible peptide. The creation of such sequences is routine to those of skill in the art. A variety of different linkers are commercially available and are considered suitable for use. Example linker polypeptides include glycine polymers (G)n, glycine-serine polymers (including, for example, (GS)n, GSGGSn (SEQ ID NO: 205), GGSGGSn (SEQ ID NO: 206), and GGGSn (SEQ ID NO: 207), where n is an integer of at least one), glycine-alanine polymers, alanine-serine polymers, glycine-proline polymers, proline polymers and proline-alanine polymers. Example linkers can comprise amino acid sequences including, but not limited to, GGSG (SEQ ID NO: 208), GGSGG (SEQ ID NO: 209), GSGSG (SEQ ID NO: 210), GSGGG (SEQ ID NO: 211), GGGSG (SEQ ID NO: 212), GSSSG (SEQ ID NO: 213), GPGP (SEQ ID NO: 214), GGP, PPP, PPAPPA (SEQ ID NO: 215), PPPGPPP (SEQ ID NO: 216) and the like. The ordinarily skilled artisan will recognize that design of a peptide conjugated to any elements described above can include linkers that are all or partially flexible, such that the linker can include a flexible linker as well as one or more portions that confer less flexible structure.

### V. Systems and Methods for Modification of PCSK9 Genes

[0329] The CRISPR proteins, guide nucleic acids, and variants thereof provided herein are useful for various applications, including as therapeutics, diagnostics, and for research. In some embodiments, to effect the methods of the disclosure for gene editing, provided herein are programmable CasX:gNA systems. The programmable nature of the CasX:gNA systems provided herein allows for the precise targeting to achieve the desired effect (nicking, cleaving, repairing, etc.) at one or more regions of predetermined interest in the target nucleic acid sequence of the PCSK9 gene. In some embodiments, it may be desirable to knock-down or knock-out expression of the PCSK9 protein in the subject comprising mutations, for example dominant mutations leading to hypercholesterolemia or autosomal dominant hypercholesterolemia. The term “knock-out” refers to the elimination of a gene or the expression of a gene. For example, a gene can be knocked out by either a deletion or an addition of a nucleotide sequence that leads to a disruption of the reading frame. As another example, a gene may be knocked out by replacing a part of the gene with an irrelevant or heterologous sequence. The term “knock-down” as used herein refers to reduction in the expression of a gene or its gene product(s). As a result of a gene knock-down, the protein activity or function may be attenuated or the protein levels may be reduced or eliminated. In such embodiments, gNAs having targeting sequences specific for a portion of the gene encoding the PCSK9 protein or the PCSK9 regulatory regions may be used. Depending on the CasX protein and gNA used, the event may be a cleavage event, allowing for knock-down/knock-out of expression. In some embodiments, PCSK9 gene expression may be disrupted or eliminated by introducing random insertions or deletions (indels), for example by utilizing the imprecise non-homologous DNA end joining (NHEJ) repair pathway. In such embodiments, the targeted region of the PCSK9 includes coding sequences (exons) of the PCSK9 gene, as inserting or deleting nucleotides within coding sequences can generate a frame shift mutation. This approach can also be used in non-coding regions such as introns, or regulatory regions to disturb expression of the PCSK9 gene. In other embodiments, the disclosure provides systems and methods for correcting mutations in the PCSK9 gene wherein a corrective sequence is knocked-in by introducing insertions or deletions at select locations by design of the targeting sequence of the gNA or by introduction of a donor template, described more fully, below.

[0330] In some embodiments, the CasX:gNA systems provided herein for modification of the PCSK9 target nucleic acid comprise a CasX variant of SEQ ID NOS: 49-160, 439, 441, 443, 445, 447-460, 472, 474, 476, 478, 480, 482, 484, 486, 488, or 490 as set forth in Tables 3, 5, 6, 7, or 9 or a variant sequence at least 60% identical, at least 70% identical, at least 80% identical, at least 81% identical, at least 82% identical, at least 83% identical, at least 84% identical, at least 85% identical, at least 86% identical, at least 86% identical, at least 87% identical, at least 88% identical, at least 89% identical, at least 89% identical, at least 90% identical, at least 91% identical, at least 92% identical, at least 93% identical, at least 94% identical, at least 95% identical, at least 96% identical, at least 97% identical, at least 98% identical, at least 99% identical, or at least 99.5% identical thereto, the gNA scaffold comprises a sequence of Table 2 or a sequence at least 65% identical, at least 70% identical, at least 75% identical, at least 80% identical, at least 81% identical, at least 82% identical, at least 83% identical, at least 84% identical, at least 85% identical, at least 86% identical, at least 86% identical, at least 87% identical, at least 88% identical, at least 89% identical, at least 89% identical, at least 90% identical, at least 91% identical, at least 92% identical, at least 93% identical, at least 94% identical, at least 95% identical, at least 96% identical, at least 97% identical, at least 98% identical, at least 99% identical, at least 99.5% identical thereto, and the gNA comprises a targeting sequence of SEQ ID NOS: 247-303, 315-436, 612-2100, or 2286-13861 or a sequence at least 65% identical, at least 70% identical, at least 75% identical, at least 80% identical, at least 85% identical, at least 90% identical, or at least 95% identical thereto and having between 15 and 30 amino acids.

[0331] In other embodiments, the disclosure provides one or more polynucleotides encoding the foregoing CasX variant proteins and gNAs. In some cases, the CasX:gNA system further comprises a donor template nucleic acid, wherein the donor template can be inserted by HDR or HITI repair mechanisms of the host cell. In the embodiments, the donor template can comprise a nucleic acid comprising at least a portion of a PCSK9 gene selected from the group consisting of a PCSK9 exon, a PCSK9 intron, a PCSK9 intron-exon junction, and a PCSK9 regulatory element and combinations thereof. In the embodiments, the donor template can comprise a sequence encoding all or a portion of SEQ ID NO:33. In some embodiments, e.g. for knock-down/knock-out modifications, the donor template sequence will have at least about 60%, 70%, 80%, 90%, 95%, 98%, 99%, or 99.9% sequence identity to the PCSK9 genomic sequence with which recombination is desired, such that upon insertion, the expression of the PCSK9 gene product is reduced or eliminated such that expression of the non-functional PCSK9 protein is decreased by at least about 10%, at least about 20%, at least about 30%, at least about 40%, at least about 50%, at least about 60%, at least about 70%, at least about 80%, or at least about 90% in comparison to a cell where the PCSK9 gene has not been modified. In some embodiments, the donor template comprises a sequence to correct the mutation(s) of the PCSK9 gene, wherein upon insertion, the expression of functional PCSK9 protein by the cells of the population is increased by at least about 10%, at least about 20%, at least about 30%, at least about 40%, at least about 50%, at least about 60%, at least about 70%, at least about 80%, or at least about 90% in comparison to a cell where the PCSK9 gene has not been modified. In other embodiments, the insertion of the corrective donor template modifies the PCSK9 gene of the cells such that at least about 50%, at least about 60%, at least about 70%, at least about 75%, at least about 80%, at least about 85%, at least about 90%, or at least about 95% of the modified cells express a detectable level of functional PCSK9. In some embodiments, the insertion of the corrective donor template modifies the PCSK9 gene of the cells such that at least about 10%, at least about 20%, at least about 30%, at least about 40%, at least about 50%, at least about 60%, at least about 70%, at least about 80%, or at least about 90% of the modified cells do not express a detectable level of non-functional PCSK9 protein.

[0332] In other embodiments, the donor template comprises a sequence to abridge the mutant exons to be excised from the PCSK9 gene; e.g., two or more consecutive exons, which can further comprise the intervening introns between the two or more consecutive exons, or a cDNA comprising the exons and a shortened synthetic intron. The donor template can be a short single-stranded or double-stranded oligonucleotide, or a long single-stranded or double-stranded oligonucleotide. The donor template sequence comprises a sequence flanked by two regions of homology (“homologous arms”) to the 5′ and 3′ sides of the break site(s) such that homology-directed repair between the target DNA region and the two flanking sequences results in insertion of the donor template at the target region. In those cases where the PCSK9 mutation spans multiple exons, the methods of the disclosure contemplate use a donor template of sufficient length that may also be optimized to contain synthetic intron sequences of shortened length (relative to the genomic intron) between the exons in the donor template to ensure proper expression and processing of the PCSK9 locus. In some embodiments, the donor polynucleotide comprises at least about 10, at least about 50, at least about 100, or at least about 200, or at least about 300, or at least about 400, or at least about 500, or at least about 600, or at least about 700, or at least about 800, or at least about 900, or at least about 1000, or at least about 10,000, or at least about 15,000 nucleotides. In other embodiments, the donor polynucleotide comprises at least about 10 to about 15,000 nucleotides, or at least about 100 to about 10,000 nucleotides, or at least about 400 to about 8,000 nucleotides, or at least about 600 to about 5000 nucleotides, or at least about 1000 to about 2000 nucleotides. The donor template sequence may comprise certain sequence differences as compared to the genomic sequence, e.g., restriction sites, nucleotide polymorphisms, selectable markers (e.g., drug resistance genes, fluorescent proteins, enzymes etc.), etc., which may be used to assess for successful insertion of the donor nucleic acid at the cleavage site or in some cases may be used for other purposes (e.g., to signify expression at the targeted genomic locus). Alternatively, these sequence differences may include flanking recombination sequences such as FLPs, loxP sequences, or the like, that can be activated at a later time for removal of the marker sequence.

[0333] A variety of strategies and methods can be employed to modify the target nucleic acid sequence in a cell using the CasX:gNA systems provided herein. As used herein “modifying” includes but is not limited to cleaving, nicking, editing, deleting, knocking in, knocking out, repairing/correcting, exon-skipping and the like. Depending on the CasX protein and gNA utilized, the editing event may be a cleavage event followed by introducing random insertions or deletions (indels) or other mutations (e.g., a substitution, duplication, or inversion of one or more nucleotides), for example by utilizing the imprecise non-homologous DNA end joining (NHEJ) repair pathway, which may generate, for example, a frame shift mutation. Alternatively, the editing event may be a cleavage event followed by homology-directed repair (HDR), homology-independent targeted integration (HITI), micro-homology mediated end joining (MMEJ), single strand annealing (SSA) or base excision repair (BER), resulting in modification of the target nucleic acid sequence.

[0334] In one embodiment, the disclosure provides for a method of modifying a target nucleic acid sequence of a PCSK9 gene comprising one or more mutations in a population of cells, the method comprising introducing into each cell of the population: i) a CasX:gNA system comprising a CasX and a gNA of any one of the embodiments described herein; ii) a CasX:gNA system comprising a CasX, a gNA, and a donor template of any one of the embodiments described herein; iii) a nucleic acid encoding the CasX and the gNA, and optionally comprising the donor template; iv) a vector selected from the group consisting of a retroviral vector, a lentiviral vector, an adenoviral vector, an adeno-associated viral (AAV) vector, and a herpes simplex virus (HSV) vector, and comprising the nucleic acid of (iii), above; v) a VLP comprising the CasX:gNA system of any one of the embodiments described herein; or vi) combinations of two or more of (i) to (v), wherein the target nucleic acid sequence of the cells targeted by the gNA is modified by the CasX protein. In some embodiments of the method, the PCSK9 target nucleic acid of at least about 1%, at least about 2%, at least about 3%, at least about 4%, at least about 5%, at least about 6%, at least about 7%, at least about 8%, at least about 9%, or at least about 10%, at least about 20%, at least about 30%, at least about 40%, at least about 50%, at least about 60% or more of the cells of the population is modified. In some embodiments of the method, the PCSK9 gene in the cells of the population is modified such that expression of non-functional PCSK9 protein is decreased by at least about 10%, at least about 20%, at least about 30%, at least about 40%, at least about 50%, at least about 60%, at least about 70%, at least about 80%, or at least about 90% in comparison to a cell where the PCSK9 gene has not been modified. In other embodiments of the method, the PCSK9 gene of the cells of the population is modified such that at least about 10%, at least about 20%, at least about 30%, at least about 40%, at least about 50%, at least about 60%, at least about 70%, at least about 80%, or at least about 90% of the modified cells do not express a detectable level of non-functional PCSK9 protein.

[0335] In one embodiment of the method, the CasX and gNA of the CasX:gNA system is introduced into the cells as an RNP. The polynucleotide can be introduced into the cells to be modified by a vector as described herein, or as a plasmid using conventional methods known in the art; e.g. electroporation, microinjection, or chemically. In some embodiments of the method, the cells to be modified are selected from the group consisting of rodent cells, mouse cells, rat cells, and non-human primate cells. In other embodiments of the method, the cells to be modified are human cells. In some embodiments of the method, the modification of the population of cells occurs in vivo in a subject, wherein the subject is selected from the group consisting of a rodent, a mouse, a rat, a non-human primate, and a human. In other embodiments of the method, the modification of the population of cells occurs ex vivo. In some embodiments of the method, the cells of the population to be modified are selected from the group consisting of progenitor cells, hematopoietic stem cells, and pluripotent stem cells. In other embodiments of the method, the cells are induced pluripotent stem cells. In some embodiments of the methods, the modified cell is a hepatocyte, or a cell of the intestine, the kidney, the central nervous system, a smooth muscle cell, macrophage or a cell of arterial walls such as the endothelium. In some embodiments, the cells of the population are autologous with respect to a subject to be administered said cell. In other embodiments of the method, the cells of the population are allogeneic with respect to a subject to be administered said cell.

[0336] In some embodiments of the method, the targeting sequence of the gNA is complementary to a sequence comprising one or more single nucleotide polymorphisms (SNPs) of the PCSK9 gene. In other embodiments, the targeting sequence of the gNA is complementary to a sequence of an exonic splicing enhancer of the PCSK9 gene.

[0337] In some embodiments of the method of modifying a target nucleic acid sequence, the target nucleic acid sequence comprises all or a portion of the PCSK9 gene. In some embodiments, the PCSK9 gene to be modified comprises a wild type sequence corresponding to a polynucleotide encoding all or a portion of the sequence of SEQ ID NO:33 or comprises a polynucleotide sequence that spans chr1:55,039,476-55,064,853 of the human genome (GRCh38/hg38) (the notation refers to the chromosome 1 (chr1), starting at the 55,039,476 bp to 55,064,853 bp on chromosome 1 (Homo sapiens Updated Annotation Release 109.20190905, GRCh38.p13) (NCBI). In some embodiments of the method, the targeting sequence of the gNA is complementary to a sequence of a PCSK9 exon selected from the group consisting of exon 1, exon 2, exon 3, exon 4, exon 5, exon 6, exon 7, exon 8, exon 9, exon 10, exon 11, and exon 12.

[0338] In some embodiments of the methods of modifying a target nucleic acid sequence, modifying the target nucleic acid sequence comprises nicking the target nucleic acid to introduce a single-stranded break in the target nucleic acid sequence, wherein the modification of the PCSK9 gene comprises introducing a mutation, an insertion, or a deletion. In some embodiments, the modifying comprises cleaving the target nucleic acid sequence to introduce a double-stranded break in the target nucleic acid, wherein the modification of the PCSK9 gene comprises introducing a mutation, an insertion, or a deletion of one or more nucleotides as compared to the wild-type sequence. In some embodiments, the mutation to be corrected by the method is a gain of function mutation. In other embodiments, the mutation to be corrected by the method is a loss of function mutation. In some cases, the PCSK9 protein to be modified comprises a mutation that disrupts the function of the PCSK9 protein. In some embodiments of the method to correct the one or more mutations, the modifying results in a correction or compensation of the mutation of the PCSK9 gene in the cells of the population such that functional PCSK9 protein is expressed by the cells. In some embodiments of the method, expression of the functional PCSK9 protein by the cells of the population is increased by at least about 10%, at least about 20%, at least about 30%, at least about 40%, at least about 50%, at least about 60%, at least about 70%, at least about 80%, or at least about 90% in comparison to a cell where the PCSK9 gene has not been modified.

[0339] In some embodiments of the method of modifying a target nucleic acid sequence, modifying the PCSK9 gene comprises binding of the CasX:gNA complex to the target nucleic acid sequence. In some embodiments, the CasX is a catalytically inactive CasX (dCasX) protein that retains the ability to bind to the gNA and the target nucleic acid sequence. For example, the target nucleic acid sequence comprises a PCSK9 sequence comprising a mutation, and binding of the dCasX:gRNA complex to the target sequence interferes with or represses transcription of mutant PCSK9 allele. In some embodiments, the dCasX comprises a mutation at residues D672, E769, and/or D935 corresponding to the CasX protein of SEQ ID NO:1 or D659, E756 and/or D922 corresponding to the CasX protein of SEQ ID NO: 2. In some embodiments of the foregoing, the mutation in the CasX reference protein is a substitution of alanine or glycine for the residue.

[0340] Methods of introducing a nucleic acid (e.g., a nucleic acid comprising a donor polynucleotide sequence, one or more nucleic acids encoding a CasX protein and/or gNA, or a vector comprising same) into a cell are known in the art, and any convenient method can be used to introduce a nucleic acid (e.g., an expression construct) into a cell. Suitable methods include e.g., viral infection, transfection, lipofection, electroporation, calcium phosphate precipitation, polyethyleneimine (PEI)-mediated transfection, DEAE-dextran mediated transfection, liposome-mediated transfection, particle gun technology, nucleofection, electroporation, direct addition by cell penetrating CasX proteins that are fused to or recruit donor DNA, cell squeezing, calcium phosphate precipitation, direct microinjection, nanoparticle-mediated nucleic acid delivery, and the like.

[0341] In some embodiments of the method, a CasX can be provided as an RNA sequence. The RNA can be provided by direct chemical synthesis, or may be transcribed in vitro from a DNA (e.g., a DNA encoding an mRNA comprising a sequence encoding the CasX protein variant). Once synthesized, the RNA may, for example, be introduced into a cell by any of the well-known techniques for introducing nucleic acids into cells, including, but not limited to microinjection, electroporation, and transfection, for translation into the CasX protein.

[0342] Nucleic acids may be introduced into the cells using well-developed transfection techniques, and the commercially available TransMessenger® reagents from Qiagen, Stemfect™ RNA Transfection Kit from Stemgent, and TransIT®-mRNA Transfection Kit from Minis Bio LLC, Lonza nucleofection, Maxagen electroporation and the like.

[0343] Introducing recombinant expression vectors comprising sequences encoding the CasX:gNA systems (and, optionally, the donor template sequences) of the disclosure into cells under in vitro conditions can occur in any suitable culture media and under any suitable culture conditions that promote the survival of the cells and production of the CasX:gNA. Introducing recombinant expression vectors into a target cell can be carried out in vivo, in vitro or ex vivo. In some embodiments of the method, vectors may be provided directly to a target host cell. For example, cells may be contacted with vectors having nucleic acids encoding the CasX and gNA of any of the embodiments described herein and, optionally, having a donor template sequence such that the vectors are taken up by the cells. Methods for contacting cells with nucleic acid vectors that are plasmids include electroporation, calcium chloride transfection, microinjection, transduction and lipofection are well known in the art. For viral vector delivery, cells can be contacted with viral particles comprising the subject viral expression vectors and the nucleic acid encoding the CasX and gNA and, optionally, the donor template. In some embodiments, the vector is an Adeno-Associated Viral (AAV) vector, wherein the AAV is selected from AAV1, AAV2, AAV3, AAV4, AAV5, AAV6, AAV7, AAV8, AAV9, AAV10, AAV11, AAV12, AAV 44.9, AAV-Rh74, or AAVRh10. In other embodiments, the vector is a lentiviral vector. Retroviruses, for example, lentiviruses, may be suitable for use in methods of the present disclosure. Commonly used retroviral vectors are “defective”, e.g., are unable to produce viral proteins required for productive infection. Rather, replication of the vector requires growth in a packaging cell line. To generate viral particles comprising nucleic acids of interest, the retroviral nucleic acids comprising the nucleic acid are packaged into viral capsids by a packaging cell line. Different packaging cell lines provide a different envelope protein (ecotropic, amphotropic or xenotropic) to be incorporated into the capsid, and this envelope protein determines the specificity or tropism of the viral particle for the cells (ecotropic for murine and rat; amphotropic for most mammalian cell types including human, dog and mouse; and xenotropic for most mammalian cell types except murine cells). The appropriate packaging cell line may be used to ensure that the cells are targeted by the packaged viral particles. Methods of introducing subject vector expression vectors into packaging cell lines, and of collecting the viral particles that are generated by the packaging lines, are well known in the art, including U.S. Pat. No. 5,173,414; Tratschin et al., Mol. Cell. Biol. 5:3251-3260 (1985); Tratschin, et al., Mol. Cell. Biol. 4:2072-2081 (1984); Hermonat & Muzyczka, PNAS 81:6466-6470 (1984); and Samulski et al., J. Virol. 63:03822-3828 (1989). Nucleic acids can also be introduced by direct micro-injection (e.g., injection of RNA).

[0344] In some embodiments, the vector is administered to a subject at a therapeutically effective dose. In the foregoing, the subject is selected from the group consisting of mouse, rat, pig, non-human primate, and human. In particular embodiments, the subject is a human. In some embodiments of the method, the vector is administered to a subject at a dose of at least about 1×10⁵ vector genomes/kg (vg/kg), at least about 1×10⁶ vg/kg, at least about 1×10⁷ vg/kg, at least about 1×10⁸ vg/kg, at least about 1×10⁹ vg/kg, at least about 1×10¹⁰ vg/kg, at least about 1×10¹¹ vg/kg, at least about 1×10¹² vg/kg, at least about 1×10¹³ vg/kg, at least about 1×10¹⁴ vg/kg, at least about 1×10¹⁵ vg/kg, or at least about 1×10¹⁶ vg/kg. In other embodiments of the method, the VLP is administered to a subject at a dose of at least about 1×10⁵ particles/kg, at least about 1×10⁶ particles/kg, at least about 1×10⁷ particles/kg, at least about 1×10⁸ particles/kg, at least about 1×10⁹ particles/kg, at least about 1×10¹⁰ particles/kg, at least about 1×10¹¹ particles/kg, at least about 1×10¹² particles/kg, at least about 1×10¹³ particles/kg, at least about 1×10¹⁴ particles/kg, at least about 1×10¹⁵ particles/kg, or at least about 1×10¹⁶ particles/kg.

[0345] The vector or VLP can be administered by a route of administration selected from the group consisting of intravenous, intraportal vein injection, intraperitoneal, intramuscular, subcutaneous, intraocular, and oral routes. In some embodiments, the vector is an AAV vector comprising a CasX:gNA system of the disclosure, and is delivered via intraocular injection to one or both eyes of the subject.

[0346] In other embodiments, the disclosure provides methods of modifying target nucleic acid sequences using the CasX:gNA systems of any of the embodiments described herein, and the methods further comprise contacting the target nucleic acid sequence with an additional CRISPR protein, or a polynucleotide encoding the additional CRISPR protein. In some embodiments, the additional CRISPR protein is a CasX protein having a sequence different from the CasX of the CasX:gNA system. In some embodiments, the additional CRISPR protein is not a CasX protein; e.g., the additional CRISPR protein can be Cpf1, Cas9, Cas12a, or Cas13a.

[0347] The CasX:gNA systems and methods described herein can be used to engineer a variety of cells in which mutations in PCSK9 are associated with disease, e.g., cells of the liver, the intestine, the kidney, the central nervous system, smooth muscle cells, macrophages or cells of arterial walls such as the endothelium, to produce a cell or cells in which the PCSK9 comprising mutations is corrected or knocked-out. This approach, therefore, could be used to modify cells for applications in a subject with a PCSK9-related disorder such as, but not limited to autosomal dominant hypercholesterolemia (ADH), hypercholesterolemia, elevated total cholesterol levels, hyperlipidemia, elevated low-density lipoprotein (LDL) levels, elevated LDL-cholesterol levels, reduced high-density lipoprotein levels, liver steatosis, coronary heart disease, ischemia, stroke, peripheral vascular disease, thrombosis, type 2 diabetes, high elevated blood pressure, atherosclerosis, obesity, Alzheimer's disease, neurodegeneration, age-related macular degeneration (AMD), or a combination thereof.

### VI. Polynucleotides and Vectors

[0348] In another aspect, the present disclosure relates to polynucleotides encoding the Class2, Type V nucleases and gNA that have utility in the editing of the PCSK9 gene comprising one or more mutations. In additional embodiments, the disclosure provides donor template polynucleotides encoding portions or all of a PCSK9 gene. In some cases, the PCSK9 gene of the donor template comprises a mutation or a heterologous sequence for knocking down or knocking out the PCSK9 gene in the target nucleic acid. In other cases, the donor template comprises a corrective sequence for knocking in a functional PCSK9 gene or portion thereof. In yet further embodiments, the disclosure provides vectors comprising polynucleotides encoding the CasX proteins and the CasX gNAs described herein, as well as the donor templates of the embodiments.

[0349] In some embodiments, the disclosure provides polynucleotide sequences encoding the reference CasX of SEQ ID NOS: 1-3. In other embodiments, the disclosure provides polynucleotide sequences encoding the CasX variants of any of the embodiments described herein, including the CasX protein variants of SEQ ID NOS: 49-160, 439, 441, 443, 445, 447-460, 472, 474, 476, 478, 480, 482, 484, 486, 488, and 490 as set forth in Tables 3, 5, 6, 7 and 9, or sequences having at least about 50%, at least about 60%, at least about 70%, at least about 80%, at least about 90%, at least about 95%, at least about 96%, at least about 97%, at least about 98%, or at least about 99% sequence identity to a sequence of SEQ ID NOS: 49-160, 439, 441, 443, 445, 447-460, 472, 474, 476, 478, 480, 482, 484, 486, 488, and 490 as set forth in Tables 3, 5, 6, 7 and 9. In some embodiments, the disclosure provides an isolated polynucleotide sequence encoding a gNA sequence of any of the embodiments described herein. In some embodiments, the disclosure provides polynucleotides encoding a gNA scaffold sequence of SEQ ID NOS: 4-16 or 2101-2285 as set forth in Table 1 or Table 2, or a sequence having at least about 50%, at least about 60%, at least about 70%, at least about 80%, at least about 90%, at least about 95%, at least about 96%, at least about 97%, at least about 98%, at least about 99% sequence identity thereto. In some embodiments, the polynucleotide encodes a gNA scaffold sequence selected from the group consisting of SEQ ID NOS:2101-2285, or a sequence having at least about 50%, at least about 60%, at least about 70%, at least about 80%, at least about 90%, at least about 95%, at least about 96%, at least about 97%, at least about 98%, at least about 99% sequence identity thereto. In other embodiments, the disclosure provides gNAs comprising targeting sequence polynucleotides of SEQ ID NOS: 247-303, 315-436, 612-2100, or 2286-13861, or a sequences having at least about 65%, at least about 75%, at least about 85%, or at least about 95% identity thereto, as well as DNA encoding the targeting sequences. In some embodiments, the polynucleotide encoding the scaffold sequence further comprises the sequence encoding the targeting sequence such that a gNA capable of binding the CasX and the target sequence can be expressed as a sgNA or dgNA. In other embodiments, the disclosure provides an isolated polynucleotide sequence encoding a gNA sequence having a scaffold and targeting sequence that hybridizes with the PCSK9 gene comprising one or more mutations. In some cases, the polynucleotide sequence encodes a gNA of a scaffold and targeting sequence that hybridizes with a PCSK9 gene exon selected from the group consisting of exon 1, exon 2, exon 3, exon 4, exon 5, exon 6, exon 7, exon 8, exon 9, exon 10, exon 11, and exon 12. In other embodiments, the polynucleotide sequence encodes a gNA comprising a targeting sequence that hybridizes with a PCSK9 intron. In other embodiments, the polynucleotide sequence encodes a gNA comprising a targeting sequence that hybridizes with a PCSK9 intron-exon junction. In other embodiments, the polynucleotide sequence encodes a gNA comprising a targeting sequence that hybridizes with an intergenic region of the PCSK9 gene. In other embodiments, the polynucleotide sequence encodes a gNA comprising a targeting sequence that hybridizes with a PCSK9 regulatory region. In some cases, the PCSK9 regulatory region is a PCSK9 promoter or enhancer. In some cases, the PCSK9 regulatory region is located 5′ of the PCSK9 transcription start site, 3′ of the PCSK9 transcription start, or in a PCSK9 intron. In some cases, the PCSK9 regulatory region is in an intron of the PCSK9 gene. In other cases, the PCSK9 regulatory region comprises the 5′ UTR of the PCSK9 gene. In still other cases, the PCSK9 regulatory region comprises the 3′UTR of the PCSK9 gene. In some cases, the PCSK9 sequence is a wild-type sequence. In other cases, the PCSK9 sequence comprises one or more mutations.

[0350] In other embodiments, the disclosure provides donor template nucleic acids wherein the donor template comprises a nucleotide sequence having homology but not complete identity to a target sequence of the target nucleic acid for which gene editing is intended. The donor template sequence is typically not identical to the genomic sequence that it replaces and may contain one or more single base changes, insertions, deletions, inversions or rearrangements with respect to the genomic sequence, provided that there is sufficient homology with the target sequence to support homology-directed repair, or the donor template has homologous arms, whereupon insertion can result in splicing out of exons comprising mutations such that the reading frame of the PCSK9 gene is restored, or the donor template comprises wild-type sequence such that upon insertions, the mutation is corrected. In some embodiments, the donor template has a sequence that hybridizes with the protein target nucleic acid and is inserted at the break sites introduced by the CasX, effecting a modification of the gene sequence. In those cases where the PCSK9 mutation spans multiple exons, the disclosure contemplates a donor template of sufficient length that may also be optimized to contain synthetic intron sequences of shortened length (relative to the genomic intron) between the exons in the donor template to ensure proper expression and processing of the PCSK9 locus. In some embodiments, the donor polynucleotide comprises at least about 10, at least about 50, at least about 100, or at least about 200, or at least about 300, or at least about 400, or at least about 500, or at least about 600, or at least about 700, or at least about 800, or at least about 900, or at least about 1000, or at least about 10,000, or at least about 15,000 nucleotides. In other embodiments, the donor polynucleotide comprises at least about 10 to about 15,000 nucleotides, or at least about 100 to about 10,000 nucleotides, or at least about 400 to about 8,000 nucleotides, or at least about 600 to about 5000 nucleotides, or at least about 1000 to about 2000 nucleotides. In some embodiments, the donor template is a single stranded DNA template or a single stranded RNA template. In other embodiments, the donor template is a double stranded DNA template.

[0351] In some embodiments, the disclosure relates to methods to produce polynucleotide sequences encoding the reference CasX, the CasX variants, or the gNA of any of the embodiments described herein, including variants thereof, as well as methods to express the proteins expressed or RNA transcribed by the polynucleotide sequences. In general, the methods include producing a polynucleotide sequence coding for the CasX or the gNA of any of the embodiments described herein and incorporating the encoding gene into an expression vector appropriate for a host cell. For production of the encoded CasX or the gNA of any of the embodiments described herein, the methods include transforming an appropriate host cell with an expression vector comprising the encoding polynucleotide, and culturing the host cell under conditions causing or permitting the resulting CasX or the gNA of any of the embodiments described herein to be expressed or transcribed in the transformed host cell, thereby producing the CasX or the gNA, which are recovered by methods described herein (e.g., in the Examples, below) or by standard purification methods known in the art. Standard recombinant techniques in molecular biology are used to make the polynucleotides and expression vectors of the present disclosure.

[0352] In accordance with the disclosure, nucleic acid sequences that encode the reference CasX, the CasX variants, or the gNA of any of the embodiments described herein are used to generate recombinant DNA molecules that direct the expression in appropriate host cells. Several cloning strategies are suitable for performing the present disclosure, many of which are used to generate a construct that comprises a gene coding for a composition of the present disclosure, or its complement. In some embodiments, the cloning strategy is used to create a gene that encodes a construct that comprises nucleotides encoding the reference CasX, the CasX variants, or the gNA that is used to transform a host cell for expression of the composition.

[0353] In one approach, a construct is first prepared containing the DNA sequence encoding a reference CasX, a CasX variant, or a gNA. Exemplary methods for the preparation of such constructs are described in the Examples. The construct is then used to create an expression vector suitable for transforming a host cell, such as a prokaryotic or eukaryotic host cell for the expression and recovery of the protein construct, in the case of the CasX, or the gNA. Where desired, the host cell is an E. coli. In other embodiments, the host cell is a eukaryotic cell. The eukaryotic host cell can be selected from BHK cells, HEK293 cells, HEK293T cells, Lenti-X HEK293 cells, NS0 cells, SP2/0 cells, YO myeloma cells, P3X63 mouse myeloma cells, PER cells, PER.C6 cells, hybridoma cells, NIH3T3 cells, COS, HeLa, CHO, yeast cells, or other eukaryotic cells known in the art suitable for the production of recombinant products. Exemplary methods for the creation of expression vectors, the transformation of host cells and the expression and recovery of reference CasX, the CasX variants, or the gNA are described in the Examples.

[0354] The gene encoding the reference CasX, the CasX variant, or the gNA construct can be made in one or more steps, either fully synthetically or by synthesis combined with enzymatic processes, such as restriction enzyme-mediated cloning, PCR and overlap extension, including methods more fully described in the Examples. The methods disclosed herein can be used, for example, to ligate sequences of polynucleotides encoding the various components (e.g., CasX and gNA) genes of a desired sequence. Genes encoding polypeptide compositions are assembled from oligonucleotides using standard techniques of gene synthesis.

[0355] In some embodiments, the nucleotide sequence encoding a CasX protein is codon optimized. This type of optimization can entail a mutation of an encoding nucleotide sequence to mimic the codon preferences of the intended host organism or cell while encoding the same CasX protein. Thus, the codons can be changed, but the encoded protein remains unchanged. For example, if the intended target cell of the CasX protein was a human cell, a human codon-optimized CasX-encoding nucleotide sequence could be used. As another non-limiting example, if the intended host cell were a mouse cell, then a mouse codon-optimized CasX-encoding nucleotide sequence could be generated. As another non-limiting example, if the intended host cell were a plant cell, then a plant codon-optimized CasX protein variant-encoding nucleotide sequence could be generated. As another non-limiting example, if the intended host cell were an insect cell, then an insect codon-optimized CasX protein-encoding nucleotide sequence could be generated. The gene design can be performed using algorithms that optimize codon usage and amino acid composition appropriate for the host cell utilized in the production of the reference CasX, the CasX variants, or the gNA. In one method of the disclosure, a library of polynucleotides encoding the components of the constructs is created and then assembled, as described above. The resulting genes are then assembled and the resulting genes used to transform a host cell and produce and recover the reference CasX, the CasX variants, or the gNA compositions for evaluation of its properties, as described herein.

[0356] In some embodiments, a nucleotide sequence encoding a gNA is operably linked to a control element, e.g., a transcriptional control element, such as a promoter. In some embodiments, a nucleotide sequence encoding a CasX protein is operably linked to a control element, e.g., a transcriptional control element, such as a promoter. In other cases, the nucleotide encoding the CasX and gNA are linked and are operably linked to a single control element. In some cases, the promoter is a constitutively active promoter. In some cases, the promoter is a regulatable promoter. In some cases, the promoter is an inducible promoter. In some cases, the promoter is a tissue-specific promoter. In some cases, the promoter is a cell type-specific promoter. In some cases, the transcriptional control element (e.g., the promoter) is functional in a targeted cell type or targeted cell population. For example, in some cases, the transcriptional control element can be functional in eukaryotic cells, e.g., neurons, spinal motor neurons, oligodendrocytes, or glial cells. Non-limiting examples of eukaryotic promoters (promoters functional in a eukaryotic cell) include EF1alpha, EF1alpha core promoter, those from cytomegalovirus (CMV) immediate early, herpes simplex virus (HSV) thymidine kinase, early and late SV40, long terminal repeats (LTRs) from retrovirus, and mouse metallothionein-I. Further non-limiting examples of eukaryotic promoters include the CMV promoter full-length promoter, the minimal CMV promoter, the chicken β-actin promoter, the hPGK promoter, the HSV TK promoter, the Mini-TK promoter, the human synapsin I promoter which confers neuron-specific expression, the Mecp2 promoter for selective expression in neurons, the minimal IL-2 promoter, the Rous sarcoma virus enhancer/promoter (single), the spleen focus-forming virus long terminal repeat (LTR) promoter, the SV40 promoter, the SV40 enhancer and early promoter, the TBG promoter: promoter from the human thyroxine-binding globulin gene (Liver specific), the PGK promoter, the human ubiquitin C promoter, the UCOE promoter (Promoter of HNRPA2B1-CBX3), the Histone H2 promoter, the Histone H3 promoter, the U1a1 small nuclear RNA promoter (226 nt), the U1b2 small nuclear RNA promoter (246 nt) 26, the TTR minimal enhancer/promoter, the b-kinesin promoter, the human eIF4A1 promoter, the ROSA26 promoter and the glyceraldehyde 3-phosphate dehydrogenase (GAPDH) promoter.

[0357] Selection of the appropriate vector and promoter is well within the level of ordinary skill in the art, as it related to controlling expression, e.g., for modifying a PCSK9 gene. The expression vector may also contain a ribosome binding site for translation initiation, and a transcription terminator. The expression vector may also include appropriate sequences for amplifying expression. The expression vector may also include nucleotide sequences encoding protein tags (e.g., 6×His tag, hemagglutinin tag, fluorescent protein, etc.) that can be fused to the CasX protein, thus resulting in a chimeric CasX protein that are used for purification or detection.

[0358] In some embodiments, a nucleotide sequence encoding each of a gNA variant or a CasX protein is operably linked to an inducible promoter, a constitutively active promoter, a spatially restricted promoter (i.e., transcriptional control element, enhancer, tissue specific promoter, cell type specific promoter, etc.), or a temporally restricted promoter. In other embodiments, individual nucleotide sequences encoding the gNA or the CasX are linked to one of the foregoing categories of promoters, which are then introduced into the cells to be modified by conventional methods, described below.

[0359] In certain embodiments, suitable promoters can be derived from viruses and can therefore be referred to as viral promoters, or they can be derived from any organism, including prokaryotic or eukaryotic organisms. Suitable promoters can be used to drive expression by any RNA polymerase (e.g., pol I, pol II, pol III). Exemplary promoters include, but are not limited to the SV40 early promoter, mouse mammary tumor virus long terminal repeat (LTR) promoter; adenovirus major late promoter (Ad MLP); a herpes simplex virus (HSV) promoter, a cytomegalovirus (CMV) promoter such as the CMV immediate early promoter region (CMVIE), a rous sarcoma virus (RSV) promoter, a human U6 small nuclear promoter (U6), an enhanced U6 promoter, a human HI promoter (HI), a POL1 promoter, a 7SK promoter, tRNA promoters and the like.

[0360] In some embodiments, one or more nucleotide sequences encoding a CasX and gNA and, optionally, comprising a donor template, are each operably linked to (under the control of) a promoter operable in a eukaryotic cell. Examples of inducible promoters may include, but are not limited to, T7 RNA polymerase promoter, T3 RNA polymerase promoter, isopropyl-beta-D-thiogalactopyranoside (IPTG)-regulated promoter, lactose induced promoter, heat shock promoter, tetracycline-regulated promoter, steroid-regulated promoter, metal-regulated promoter, estrogen receptor-regulated promoter, etc. Inducible promoters can therefore, in some embodiments, be regulated by molecules including, but not limited to, doxycycline; estrogen and/or an estrogen analog; IPTG; etc.

[0361] In certain embodiments, inducible promoters suitable for use may include any inducible promoter described herein or known to one of ordinary skill in the art. Examples of inducible promoters include, without limitation, chemically/biochemically-regulated and physically-regulated promoters such as alcohol-regulated promoters, tetracycline-regulated promoters (e.g., anhydrotetracycline (aTc)-responsive promoters and other tetracycline-responsive promoter systems, which include a tetracycline repressor protein (tetR), a tetracycline operator sequence (tetO) and a tetracycline transactivator fusion protein (tTA), steroid-regulated promoters (e.g., promoters based on the rat glucocorticoid receptor, human estrogen receptor, moth ecdysone receptors, and promoters from the steroid/retinoid/thyroid receptor superfamily), metal-regulated promoters (e.g., promoters derived from metallothionein (proteins that bind and sequester metal ions) genes from yeast, mouse and human), pathogenesis-regulated promoters (e.g., induced by salicylic acid, ethylene or benzothiadiazole (BTH)), temperature/heat-inducible promoters (e.g., heat shock promoters), and light-regulated promoters (e.g., light responsive promoters from plant cells).

[0362] In some cases, the promoter is a spatially restricted promoter (i.e., cell type specific promoter, tissue specific promoter, etc.) such that in a multi-cellular organism, the promoter is active (i.e., “ON”) in a subset of specific cells. Spatially restricted promoters may also be referred to as enhancers, transcriptional control elements, control sequences, etc. Any convenient spatially restricted promoter may be used as long as the promoter is functional in the targeted host cell (e.g., eukaryotic cell; prokaryotic cell).

[0363] In some cases, the promoter is a reversible promoter. Suitable reversible promoters, including reversible inducible promoters are known in the art. Such reversible promoters may be isolated and derived from many organisms, e.g., eukaryotes and prokaryotes. Modification of reversible promoters derived from a first organism for use in a second organism, e.g., a first prokaryote and a second a eukaryote, a first eukaryote and a second a prokaryote, etc., is well known in the art. Such reversible promoters, and systems based on such reversible promoters but also comprising additional control proteins, include, but are not limited to, alcohol regulated promoters (e.g., alcohol dehydrogenase I (alcA) gene promoter, promoters responsive to alcohol transactivator proteins (AlcR, etc.), tetracycline regulated promoters, (e.g., promoter systems including Tet Activators, TetON, TetOFF, etc.), steroid regulated promoters (e.g., rat glucocorticoid receptor promoter systems, human estrogen receptor promoter systems, retinoid promoter systems, thyroid promoter systems, ecdysone promoter systems, mifepristone promoter systems, etc.), metal regulated promoters (e.g., metallothionein promoter systems, etc.), pathogenesis-related regulated promoters (e.g., salicylic acid regulated promoters, ethylene regulated promoters, benzothiadiazole regulated promoters, etc.), temperature regulated promoters (e.g., heat shock inducible promoters (e.g., HSP-70, HSP-90, soybean heat shock promoter, etc.), light regulated promoters, synthetic inducible promoters, and the like.

[0364] Recombinant expression vectors of the disclosure can also comprise elements that facilitate robust expression of CasX proteins and the gNAs of the disclosure. For example, recombinant expression vectors can include one or more of a polyadenylation signal (poly(A)), an intronic sequence or a post-transcriptional regulatory element such as a woodchuck hepatitis post-transcriptional regulatory element (WPRE). Exemplary poly(A) sequences include hGH poly(A) signal (short), HSV TK poly(A) signal, synthetic polyadenylation signals, SV40 poly(A) signal, β-globin poly(A) signal and the like. A person of ordinary skill in the art will be able to select suitable elements to include in the recombinant expression vectors described herein.

[0365] The polynucleotides encoding the reference CasX, the CasX variants, or the gNA sequences can be individually cloned into an expression vector. Vectors include bacterial plasmids, viral vectors, and the like. In some embodiments, the vector is a recombinant expression vector that comprises a nucleotide sequence encoding a CasX protein. In other embodiments, the disclosure provides a recombinant expression vector comprising a nucleotide sequence encoding a CasX protein and a nucleotide sequence encoding a CasX gNA. In some cases, the nucleotide sequence encoding the CasX protein variant and/or the nucleotide sequence encoding the CasX gNA are operably linked to a promoter that is operable in a cell type of choice. In other embodiments, the nucleotide sequence encoding the CasX protein variant and the nucleotide sequence encoding the CasX gNA are provided in separate vectors.

[0366] In some embodiments, provided herein are one or more recombinant expression vectors comprising sequences such as (i) a nucleotide sequence of a donor template nucleic acid where the donor template comprises a nucleotide sequence having homology to a PCSK9 sequence of a target nucleic acid sequence (e.g., a target genome); (ii) a nucleotide sequence that encodes a CasX gNA (e.g., gRNA), that hybridizes to a sequence of the target PCSK9 locus of the targeted genome (e.g., configured as a single or dual guide RNA) operably linked to a promoter that is operable in a target cell such as a eukaryotic cell; and (iii) a nucleotide sequence encoding a CasX protein operably linked to a promoter that is operable in a target cell such as a eukaryotic cell. In some embodiments, the sequences comprising the donor template and encoding the CasX gNA and the CasX proteins are in different recombinant expression vectors, and in other embodiments one, two or all three polynucleotide sequences (for the donor template, CasX and gNA) are in the same recombinant expression vector.

[0367] The nucleic acid sequence is inserted into the vector by a variety of procedures. In general, DNA is inserted into an appropriate restriction endonuclease site(s) using techniques known in the art. Vector components generally include, but are not limited to, one or more of a signal sequence, an origin of replication, one or more marker genes, an enhancer element, a promoter, and a transcription termination sequence. Construction of suitable vectors containing one or more of these components employs standard ligation techniques which are known to the skilled artisan. Such techniques are well known in the art and well described in the scientific and patent literature. Various vectors are publicly available. The vector may, for example, be in the form of a plasmid, cosmid, viral particle, or phage that may conveniently be subjected to recombinant DNA procedures, and the choice of vector will often depend on the host cell into which it is to be introduced. Thus, the vector may be an autonomously replicating vector, i.e., a vector, which exists as an extrachromosomal entity, the replication of which is independent of chromosomal replication, e.g., a plasmid. Alternatively, the vector may be one which, when introduced into a host cell, is integrated into the host cell genome and replicated together with the chromosome(s) into which it has been integrated. Once introduced into a suitable host cell, expression of the CasX PCSK9 editing system can be determined using any nucleic acid or protein assay known in the art. For example, the presence of transcribed mRNA of reference CasX or the CasX variants can be detected and/or quantified by conventional hybridization assays (e.g., Northern blot analysis), amplification procedures (e.g. RT-PCR), SAGE (U.S. Pat. No. 5,695,937), and array-based technologies (see e.g., U.S. Pat. Nos. 5,405,783, 5,412,087 and 5,445,934), using probes complementary to any region of CasX polynucleotide.

[0368] The disclosure provides for the use of plasmid expression vectors containing replication and control sequences that are compatible with and recognized by the host cell and are operably linked to the gene encoding the polypeptide for controlled expression of the polypeptide or transcription of the RNA. Such vector sequences are well known for a variety of bacteria, yeast, and viruses. Useful expression vectors that can be used include, for example, segments of chromosomal, non-chromosomal and synthetic DNA sequences. “Expression vector” refers to a DNA construct containing a DNA sequence that is operably linked to a suitable control sequence capable of effecting the expression of the DNA encoding the polypeptide in a suitable host. The requirements are that the vectors are replicable and viable in the host cell of choice. Low- or high-copy number vectors may be used as desired. The control sequences of the vector include a promoter to effect transcription, an optional operator sequence to control such transcription, a sequence encoding suitable mRNA ribosome binding sites, and sequences that control termination of transcription and translation. The promoter may be any DNA sequence, which shows transcriptional activity in the host cell of choice and may be derived from genes encoding proteins either homologous or heterologous to the host cell.

[0369] The recombinant expression vectors can be delivered to the target host cells by a variety of methods, as described more fully, below. Such methods include e.g., viral infection, transfection, lipofection, electroporation, calcium phosphate precipitation, polyethyleneimine (PEI)-mediated transfection, DEAE-dextran mediated transfection, liposome-mediated transfection, particle gun technology, nucleofection, electroporation, direct addition by cell penetrating CasX proteins that are fused to or recruit donor DNA, cell squeezing, calcium phosphate precipitation, direct microinjection, nanoparticle-mediated nucleic acid delivery, and the like.

[0370] A recombinant expression vector sequence can be packaged into a virus or virus-like particle (also referred to herein as a “particle” or “virion”) for subsequent infection and transformation of a cell, ex vivo, in vitro or in vivo. Such particles or virions will typically include proteins that encapsidate or package the vector genome. Suitable expression vectors may include viral expression vectors based on vaccinia virus; poliovirus; adenovirus; a retroviral vector (e.g., Murine Leukemia Virus), spleen necrosis virus, and vectors derived from retroviruses such as Rous Sarcoma Virus, Harvey Sarcoma Virus, avian leukosis virus, a lentivirus, human immunodeficiency virus, myeloproliferative sarcoma virus, and mammary tumor virus; and the like.

[0371] In some embodiments, a recombinant expression vector of the present disclosure is a recombinant adeno-associated virus (AAV) vector. In some embodiments, a recombinant expression vector of the present disclosure is a recombinant lentivirus vector. In some embodiments, a recombinant expression vector of the present disclosure is a recombinant retroviral vector.

[0372] AAV is a small (20 nm), nonpathogenic virus that is useful in treating human diseases in situations that employ a viral vector for delivery to a cell such as a eukaryotic cell, either in vivo or ex vivo for cells to be prepared for administering to a subject. A construct is generated, for example a construct encoding any of the CasX proteins and/or CasX gNA embodiments as described herein, and is flanked with AAV inverted terminal repeat (ITR) sequences, thereby enabling packaging of the AAV vector into an AAV viral particle.

[0373] An “AAV” vector may refer to the naturally occurring wild-type virus itself or derivatives thereof. The term covers all subtypes, serotypes and pseudotypes, and both naturally occurring and recombinant forms, except where required otherwise. As used herein, the term “serotype” refers to an AAV which is identified by and distinguished from other AAVs based on capsid protein reactivity with defined antisera, e.g., there are many known serotypes of primate AAVs. In some embodiments, the AAV vector is selected from AAV1, AAV2, AAV3, AAV4, AAV5, AAV6, AAV7, AAV8, AAV9, AAV10, AAV11, AAV12, AAV 44.9, AAV-Rh74 (Rhesus macaque-derived AAV), and AAVRh10, and modified capsids of these serotypes. For example, serotype AAV-2 is used to refer to an AAV which contains capsid proteins encoded from the cap gene of AAV-2 and a genome containing 5′ and 3′ ITR sequences from the same AAV-2 serotype. Pseudotyped AAV refers to an AAV that contains capsid proteins from one serotype and a viral genome including 5′-3′ ITRs of a second serotype. Pseudotyped rAAV would be expected to have cell surface binding properties of the capsid serotype and genetic properties consistent with the ITR serotype. Pseudotyped recombinant AAV (rAAV) are produced using standard techniques described in the art. As used herein, for example, rAAV1 may be used to refer an AAV having both capsid proteins and 5′-3′ ITRs from the same serotype or it may refer to an AAV having capsid proteins from serotype 1 and 5′-3′ ITRs from a different AAV serotype, e.g., AAV serotype 2. For each example illustrated herein the description of the vector design and production describes the serotype of the capsid and 5′-3′ ITR sequences.

[0374] An “AAV virus” or “AAV viral particle” refers to a viral particle composed of at least one AAV capsid protein (preferably by all of the capsid proteins of a wild-type AAV) and an encapsidated polynucleotide. If the particle additionally comprises a heterologous polynucleotide (i.e., a polynucleotide other than a wild-type AAV genome to be delivered to a mammalian cell), it is typically referred to as “rAAV”. An exemplary heterologous polynucleotide is a polynucleotide comprising a CasX protein and/or sgRNA and, optionally, a donor template of any of the embodiments described herein.

[0375] By “adeno-associated virus inverted terminal repeats” or “AAV ITRs” is meant the art recognized regions found at each end of the AAV genome which function together in cis as origins of DNA replication and as packaging signals for the virus. AAV ITRs, together with the AAV rep coding region, provide for the efficient excision and rescue from, and integration of a nucleotide sequence interposed between two flanking ITRs into a mammalian cell genome.

[0376] The nucleotide sequences of AAV ITR regions are known. See, for example Kotin, R. M. (1994) Human Gene Therapy 5:793-801; Berns, K. I. “Parvoviridae and their Replication” in Fundamental Virology, 2^{nd} Edition, (B. N. Fields and D. M. Knipe, eds.). As used herein, an AAV ITR need not have the wild-type nucleotide sequence depicted, but may be altered, e.g., by the insertion, deletion or substitution of nucleotides. Additionally, the AAV ITR may be derived from any of several AAV serotypes, including without limitation, AAV1, AAV2, AAV3, AAV4, AAV5, AAV6, AAV7, AAV8, AAV9, AAV10, AAV-Rh74, and AAVRh10, and modified capsids of these serotypes. Furthermore, 5′ and 3′ ITRs which flank a selected nucleotide sequence in an AAV vector need not necessarily be identical or derived from the same AAV serotype or isolate, so long as they function as intended, i.e., to allow for excision and rescue of the sequence of interest from a host cell genome or vector, and to allow integration of the heterologous sequence into the recipient cell genome when AAV Rep gene products are present in the cell. Use of AAV serotypes for integration of heterologous sequences into a host cell is known in the art (see, e.g., WO2018195555A1 and US20180258424A1, incorporated by reference herein.)

[0377] By “AAV rep coding region” is meant the region of the AAV genome which encodes the replication proteins Rep 78, Rep 68, Rep 52 and Rep 40. These Rep expression products have been shown to possess many functions, including recognition, binding and nicking of the AAV origin of DNA replication, DNA helicase activity and modulation of transcription from AAV (or other heterologous) promoters. The Rep expression products are collectively required for replicating the AAV genome. By “AAV cap coding region” is meant the region of the AAV genome which encodes the capsid proteins VP1, VP2, and VP3, or functional homologues thereof. These Cap expression products supply the packaging functions which are collectively required for packaging the viral genome.

[0378] In some embodiments, AAV capsids utilized for delivery of the encoding sequences for the CasX and gNA, and, optionally, the PCSK9 donor template nucleotides to a host cell can be derived from any of several AAV serotypes, including without limitation, AAV1, AAV2, AAV3, AAV4, AAV5, AAV6, AAV7, AAV8, AAV9, AAV10, AAV11, AAV12, AAV 44.9, AAV-Rh74 (Rhesus macaque-derived AAV), and AAVRh10, and the AAV ITRs are derived from AAV serotype 2.

[0379] In order to produce rAAV viral particles, an AAV expression vector is introduced into a suitable host cell using known techniques, such as by transfection. Packaging cells are typically used to form virus particles; such cells include HEK293 cells (and other cells known in the art), which package adenovirus. A number of transfection techniques are generally known in the art; see, e.g., Sambrook et al. (1989) Molecular Cloning, a laboratory manual, Cold Spring Harbor Laboratories, New York. Particularly suitable transfection methods include calcium phosphate co-precipitation, direct microinjection into cultured cells, electroporation, liposome mediated gene transfer, lipid-mediated transduction, and nucleic acid delivery using high-velocity microprojectiles.

[0380] In some embodiments, host cells transfected with the above-described AAV expression vectors are rendered capable of providing AAV helper functions in order to replicate and encapsidate the nucleotide sequences flanked by the AAV ITRs to produce rAAV viral particles. AAV helper functions are generally AAV-derived coding sequences which can be expressed to provide AAV gene products that, in turn, function in trans for productive AAV replication. AAV helper functions are used herein to complement necessary AAV functions that are missing from the AAV expression vectors. Thus, AAV helper functions include one, or both of the major AAV ORFs (open reading frames), encoding the rep and cap coding regions, or functional homologues thereof. Accessory functions can be introduced into and then expressed in host cells using methods known to those of skill in the art. Commonly, accessory functions are provided by infection of the host cells with an unrelated helper virus. In some embodiments, accessory functions are provided using an accessory function vector. Depending on the host/vector system utilized, any of a number of suitable transcription and translation control elements, including constitutive and inducible promoters, transcription enhancer elements, transcription terminators, etc., may be used in the expression vector.

[0381] In other embodiments, retroviruses, for example, lentiviruses, may be suitable for use as vectors for delivery of the encoding nucleic acids of the CasX:gNA systems of the present disclosure. Commonly used retroviral vectors are “defective”, e.g. unable to produce viral proteins required for productive infection, and may be referred to a virus-like particles (VLP). Rather, replication of the vector requires growth in a packaging cell line. To generate viral particles comprising nucleic acids of interest, the retroviral nucleic acids comprising the nucleic acid are packaged into VLP capsids by a packaging cell line. Different packaging cell lines provide a different envelope protein (ecotropic, amphotropic or xenotropic) to be incorporated into the capsid, this envelope protein determining the specificity of the viral particle for the cells (ecotropic for murine and rat; amphotropic for most mammalian cell types including human, dog and mouse; and xenotropic for most mammalian cell types except murine cells). The appropriate packaging cell line may be used to ensure that the cells are targeted by the packaged viral particles. Methods of introducing subject vector expression vectors into packaging cell lines and of collecting the viral particles that are generated by the packaging lines are well known in the art.

[0382] In other embodiments, the disclosure provides VLPs produced in vitro that comprise a CasX:gNA RNP complex of the CasX and gNA of any of the embodiments described herein and, optionally, a donor template. Combinations of structural proteins from different viruses can be used to create VLPs, including components from virus families including Parvoviridae (e.g., adeno-associated virus), Retroviridae (e.g., HIV), Flaviviridae (e.g., Hepatitis C virus), Paramyxoviridae (e.g., Nipah) and bacteriophages (e.g., Qβ, AP205). In some embodiments, the disclosure provides VLP systems designed using components of retrovirus, including lentiviruses such as HIV, in which individual plasmids comprising nucleic acids encoding the various components are introduced into a packaging cell that, in turn, produces the VLP. In some embodiments, the VLP retroviral components can be derived from any of the Retroviridae family, including Othoretrovirinae (Lentivirus, Alpharetrovirus, Betaretrovirus, Deltaretrovirus, Epsilonretrovirus, Gammaretrovirus), and Spumaretrovirinae. Exemplary VLP comprising CasX editing systems are described in PCT/US2020/063488,filed on Dec. 4, 2020, the contents of which are incorporated by reference in their entirety herein. In some embodiments, the disclosure provides VLP having an retroviral capsid that contains a CasX:gNA RNP wherein upon administration and entry into a target cell, the RNP molecule free to be transported into the nucleus of the cell. The foregoing offers advantages over other vectors in the art in that viral transduction to dividing and non-dividing cells is efficient and that the VLP delivers potent and short-lived RNP that escape a subject's immune surveillance mechanisms that would otherwise detect a foreign protein.

[0383] In some embodiments, a VLP system comprises a) a first nucleic acid comprising a sequence encoding a fusion polypeptide that comprises: i) one or more components of a Gag polyprotein; ii) a CasX protein of any of the embodiments described herein; and optionally iii) a protease cleavage site, wherein the protease cleavage site is located between the gag polyprotein component and the CasX protein of the fusion protein; b) a second nucleic acid comprising a sequence encoding a guide NA of any of the embodiments described herein; and c) a third nucleic acid comprising a sequence encoding a lentiviral pol polyprotein comprising a protease capable of cleaving the protease cleavage site between the CasX protein and the gag polyprotein. In the foregoing embodiment, the one or more components of the Gag polyprotein are selected from the group consisting of matrix protein (MA), nucleocapsid protein (NC), capsid protein (CA), p 1-p6 protein, a PP21/24 peptide, a P12/P3/P8 peptide, a p2 peptide, a P10 peptide, a p68 Gag polypeptide, a p3 Gag polypeptide. In some embodiments of the foregoing, the VLP system further comprises a fourth nucleic acid, comprising a sequence encoding a pseudotyping viral envelope protein or glycoprotein that provides for binding to a target cell or, in the alternative, the nucleic acid encodes an antibody fragment that provides for binding to a target cell, or comprises both the pseudotyping viral envelope protein or glycoprotein and the antibody fragment. The envelope protein or glycoprotein can be derived from any enveloped viruses known in the art to confer tropism to VLP, including but not limited to the group consisting of influenza A, influenza B, influenza C virus, hepatitis A virus, hepatitis B virus, hepatitis C virus, hepatitis D virus, hepatitis E virus, rotavirus, Norwalk virus, enteric adenovirus, parvovirus, Dengue fever virus, monkey pox, Mononegavirales, rabies virus, Lagos bat virus, Mokola virus, Duvenhage virus, European bat virus 1, European bat virus 2, Australian bat virus, Ephemerovirus, Vesiculovirus, vesicular stomatitis virus (VSV), herpes simplex virus type 1, herpes simplex virus type 2, varicella zoster, cytomegalovirus, Epstein-Bar virus (EBV), human herpesvirus (HHV), human herpesvirus type 6, human herpesvirus type 8, human immunodeficiency virus (HIV), papilloma virus, murine gammaherpesvirus, Argentine hemorrhagic fever virus, Bolivian hemorrhagic fever virus, Sabia-associated hemorrhagic fever virus, Venezuelan hemorrhagic fever virus, Lassa fever virus, Machupo virus, lymphocytic choriomeningitis virus (LCMV), Crimean-Congo hemorrhagic fever virus, Hantavirus, Rift Valley fever virus, Ebola hemorrhagic fever virus, Marburg hemorrhagic fever virus, Kaysanur Forest disease virus, Omsk hemorrhagic fever virus, tick-borne encephalitis causing virus, Hendra virus, Nipah virus, variola major virus, variola minor virus, Venezuelan equine encephalitis virus, eastern equine encephalitis virus, western equine encephalitis virus, SARS-associated coronavirus (SARS-CoV), and West Nile virus. In some embodiments, the packaging cell used for the production of VLP is selected from the group consisting of HEK293 cells, Lenti-X 293T cells, BHK cells, HepG2, Saos-2, HuH7, NS0 cells, SP2/0 cells, YO myeloma cells, A549 cells, P3X63 mouse myeloma cells, PER cells, PER.C6 cells, hybridoma cells, VERO, NIH3T3 cells, COS, WI38, MRCS, A549, HeLa cells (e.g., B-50), CHO cells, and HT1080 cells. Upon production and recovery of the VLP comprising the CasX:gNA RNP of any of the embodiments described herein, the VLP can be used in methods to edit target cells of subjects by the administering of such VLP, as described more fully, below.

### VII. Therapeutic Methods

[0384] The present disclosure provides methods of treating a PCSK9-related disorder in a subject in need thereof, including but not limited to autosomal dominant hypercholesterolemia (ADH), hypercholesterolemia, elevated total cholesterol levels, elevated low-density lipoprotein (LDL) levels, reduced high-density lipoprotein levels, liver steatosis, atherosclerotic cardiovascular disease, and coronary artery disease, ischemia, stroke, peripheral vascular disease, thrombosis, type 2 diabetes, high elevated blood pressure, obesity, Alzheimer's disease, neurodegeneration, age-related macular degeneration (AMD), or a combination thereof. In some embodiments, the methods of the disclosure can prevent, treat and/or ameliorate a PCSK9-related disorder of a subject by the administering to the subject of a composition of the disclosure. In some embodiments, the composition administered to the subject further comprises pharmaceutically acceptable carrier, diluent or excipient.

[0385] In some cases, one or both alleles of the PCSK9 gene of the subject comprises a mutation. In some cases, the PCSK9-related disorder mutation is a gain of function mutation, including, but not limited to mutations encoding amino acid substitutions selected from the group consisting of S127R, D129G, F216L, D374H, and D374Y relative to the sequence of SEQ ID NO:33. In other cases, the PCSK9-related disorder mutation is a loss of function mutation including, but not limited to mutations encoding amino acid substitutions selected from the group consisting of R46L, G106R, Y142X, N157K, R237W and C679X relative to the sequence of SEQ ID NO: 33. In other cases, the PCSK9-related disorder mutation comprises a PCKS9 allele disclosed in Table B. In other cases, the PCSK9 gene encodes a mutation that alters the function or expression of the PCSK9 protein such as, but not limited to, substitutions, deletions or insertions of one or more nucleotides as compared to the wild-type sequence.

[0386] In some embodiments, the disclosure provides methods of treating a PCSK9 or related disorder in a subject in need thereof comprising modifying a PCSK9 gene in a cell of the subject, the modifying comprising contacting said cells with a therapeutically effective dose of i) a composition comprising a CasX and a gNA of any of the embodiments described herein; ii) a composition comprising a CasX, a gNA, and a donor template of any of the embodiments described herein; iii) one or more nucleic acids encoding or comprising the compositions of (i) or (ii); iv) a vector selected from the group consisting of a retroviral vector, a lentiviral vector, an adenoviral vector, an adeno-associated viral (AAV) vector, a herpes simplex virus (HSV) vector and comprising the nucleic acids of (iii); v) a VLP comprising the composition of (i) or (ii); or vi) combinations of two or more of (i)-(v), wherein the PCSK9 gene of the cells is modified by the CasX protein and, optionally, the donor template such that a wild-type or a functional PCSK9 protein is expressed. In some embodiments of the method, a second gNA having a scaffold of any of the embodiments described herein is utilized, wherein the second gNA has a targeting sequence complementary to a different or overlapping portion of the target nucleic acid compared to the first gNA, resulting in an additional break in the PCSK9 target nucleic acid of the cells of the subject. In the foregoing, the gene can be modified by the NHEJ host repair mechanisms, or utilized in conjunction with a donor template that is inserted by HDR or HITI mechanisms to either excise or correct the mutation, resulting in the expression of a functional PCSK9 protein. The modified cell of the treated subject can be a eukaryotic cell selected from the group consisting of a rodent cell, a mouse cell, a rat cell, a primate cell, a non-human primate cell, and a human cell. In some embodiments, the eukaryotic cell of the treated subject is a human cell. In some embodiments, the cell is a cell involved in the production of LDL, including but not limited to a hepatocyte, or a cell of the intestine, the kidney, the central nervous system, a smooth muscle cell, macrophage, a retinal cell, or cell of arterial walls such as the endothelium. In some embodiments, the cell is an eye cell. In some embodiments, the cell comprises at least one modified allele of a PCSK9 gene in a cell wherein the modification is used to correct a mutation in the subject. In some cases, the mutation of the subject is a gain of function mutation. In other cases, the mutation of the subject is a loss of function mutation.

[0387] In some embodiments of the method of treatment, the method comprises administering to the subject a therapeutically effective dose of a vector of any of the embodiments described herein comprising or encoding the CasX protein and the gNA and, optionally, the donor template (described supra), wherein the contacting of the cells of the subject with the vector results in modification of the target nucleic acid of the cells by the CasX:gNA complex. In some embodiments, the method comprises administration of the vector comprising or encoding a CasX and a plurality of gNAs targeted to different locations in the PCSK9 gene, wherein the contacting of the cells of the subject with the CasX:gNA complexes results in modification of the target nucleic acid of the cells. In one particular embodiment, the vector is an AAV selected from the group consisting of AAV1, AAV2, AAV3, AAV4, AAV5, AAV6, AAV7, AAV8, AAV9, AAV10, AAV11, AAV12, AAV 44.9, AAV-Rh74, or AAVRh10. The vector of the embodiments are administered to the subject at a therapeutically effective dose. In some embodiments, the vector is administered to the subject at a dose of at least about 1×10⁵ vector genomes/kg (vg/kg), at least about 1×10⁶ vg/kg, at least about 1×10⁷ vg/kg, at least about 1×10⁸ vg/kg, at least about 1×10⁹ vg/kg, at least about 1×10¹⁰ vg/kg, at least about 1×10¹¹ vg/kg, at least about 1×10¹² vg/kg, at least about 1×10¹³ vg/kg, at least about 1×10¹⁴ vg/kg, at least about 1×10¹⁵ vg/kg, or at least about 1×10¹⁶ vg/kg. In other embodiments of the method, the VLP is administered to a subject at a dose of at least about 1×10⁵ particles/kg, at least about 1×10⁶ particles/kg, at least about 1×10⁷ particles/kg, at least about 1×10⁸ particles/kg, at least about 1×10⁹ particles/kg, at least about 1×10¹⁰ particles/kg, at least about 1×10¹¹ particles/kg, at least about 1×10¹² particles/kg, at least about 1×10¹³ particles/kg, at least about 1×10¹⁴ particles/kg, at least about 1×10¹⁵ particles/kg, or at least about 1×10¹⁶ particles/kg. The vector or VLP can be administered by a route of administration selected from the group consisting of intravenous, intraportal vein injection, intraperitoneal, intramuscular, subcutaneous, intraocular, and oral routes. In some embodiments of the methods of treating a PCSK9-related disorder in a subject, the subject is selected from the group consisting of mouse, rat, pig, non-human primate, and human.

[0388] In other embodiments of the methods of treatment, the methods comprises further administering an additional CRISPR protein, or a polynucleotide encoding the additional CRISPR protein to the subject. In the foregoing embodiment, the additional CRISPR protein has a sequence different from the first CasX protein of the method. In some embodiments, the additional CRISPR protein is not a CasX protein; i.e., is a Cpf1, Cas9, Cas10, Cas12a, or Cas13a. In some cases, the gNA used in the method of treatment is a single-molecule gNA (sgNA). In other cases, the gNA is a dual-molecule gNA (dgNA). In still other cases, the method comprises contacting the target nucleic acid sequence with a plurality of gNAs targeted to different or overlapping sequences of the PCSK9 gene.

[0389] A number of therapeutic strategies have been used to design the compositions for use in the methods of treatment of a subject with a PCSK9-related disorder. In some embodiments, the invention provides a method of treatment of a subject having a PCSK9-related disorder, the method comprising administering to the subject a CasX:gNA composition or a vector of any of the embodiments disclosed herein according to a treatment regimen comprising one or more consecutive doses using a therapeutically effective dose. In some embodiments of the treatment regimen, the therapeutically effective dose of the composition or vector is administered as a single dose. In other embodiments of the treatment regimen, the therapeutically effective dose is administered to the subject as two or more doses over a period of at least two weeks, or at least one month, or at least two months, or at least three months, or at least four months, or at least five months, or at least six months. In some embodiments of the treatment regiment, the effective doses are administered by a route selected from the group consisting of intravenous, intraportal vein injection, intraperitoneal, intramuscular, subcutaneous, intraocular, and oral routes.

[0390] In some embodiments of the method of treatment of a subject with a PCSK9-related disorder, the method comprises administering to the subject a CasX:gNA composition as an RNP within a VLP disclosed herein according to a treatment regimen comprising one or more consecutive doses using a therapeutically effective dose.

[0391] In some embodiments, the administering of the therapeutically effective amount of a CasX:gNA modality, including a vector comprising a polynucleotide encoding a CasX protein and a guide nucleic acid, or the administering of a CasX-gNA composition disclosed herein, to knock down or knock out expression of PCSK9 to a subject with a PCSK9-related disorder leads to the prevention or amelioration of the underlying PCSK9-related disorder such that an improvement is observed in the subject, notwithstanding that the subject may still be afflicted with the underlying disorder. In some embodiments, the administration of the therapeutically effective amount of the CasX-gNA modality leads to an improvement in at least one clinically-relevant endpoint including, but not limited to percent change from baseline in LDL-cholesterol, decrease in plaque atheroma volume, reduction in in coronary plaque, reduction in atherosclerotic cardiovascular disease (ASCVD), cardiovascular death, nonfatal myocardial infarction, ischemic stroke, nonfatal stroke, coronary revascularization, unstable angina, or visual acuity. In some embodiments, the administration of the therapeutically effective amount of the CasX-gNA modality leads to an improvement in at least two clinically-relevant endpoints. In some embodiments, the subject is selected from mouse, rat, pig, dog, non-human primate, and human.

[0392] In some embodiments, the methods of treatment further comprise administering a chemotherapeutic agent wherein the agent is effective in lowering LDL levels. Such agents include, but are not limited to, statins, niacin, fibrates, or anti-PCSK9 antibody drugs.

[0393] Methods of obtaining samples from treated subjects for analysis to determine the effectiveness of the treatment, such as body fluids or tissues, and methods of preparation of the samples to allow for analysis are well known to those skilled in the art. Methods for analysis of RNA and protein levels are discussed above and are well known to those skilled in the art. The effects of treatment can also be assessed by measuring biomarkers associated with the target gene expression in the aforementioned fluids, tissues or organs, collected from an animal contacted with one or more compounds of the invention, by routine clinical methods known in the art. Biomarkers of PCSK9 disorders include, but are not limited to, PCSK9 levels, low-density lipoprotein (LDL-cholesterol), apolipoprotein B, non-HDL cholesterol, triglycerides and lipoprotein a, soluble CD40 ligand, osteopontin (OPN), osteoprotegerin (OPG), matrix metalloproteinases (MMP) and myeloperoxidase (MPOP), wherein the concentration of the marker is compared to concentrations known to be physiologically normal or in subjects not having a PCSK9 disorder.

[0394] Several mouse models expressing mutant forms of PCSK9 exist and are suitable for evaluating the methods of treatment. Transgenic mouse models of PCSK9-related disorders include knock-in mouse models having hPCSK9 (Carreras, A. In vivo genome and base editing of a human PCSK9 knock-in hypercholesterolemic mouse model. MC Biology 17:4 (2019); Herbert B., et al. Increased secretion of lipoproteins in transgenic mice expressing human D374Y PCSK9 under physiological genetic control. Arterioscler Thromb Vasc Biol. 30(7):1333 (2010)).

### VIII. Pharmaceutical Compositions, Kits, and Articles of Manufacture

[0395] In some embodiments, the disclosure provides pharmaceutical compositions comprising: i) a CasX protein and one or a plurality of gNA of any of the embodiments of the disclosure comprising a targeting sequence specific for a PCSK9 gene; ii) one or more nucleic acids encoding the CasX and the gNA of (i); iii) a vector comprising the one or more nucleic acids of (ii); or iv) a VLP comprising an RNP of the CasX and gNA of (i); together with one or more pharmaceutically suitable excipients. In some embodiments, the pharmaceutical composition is formulated for a route of administration selected from the group consisting of intravenous, intraportal vein injection, intraperitoneal, intramuscular, subcutaneous, intraocular, and oral routes. In one embodiment, the pharmaceutical composition is in a liquid form or a frozen form. In another embodiment, the pharmaceutical composition is in a pre-filled syringe for a single injection. In another embodiment, the pharmaceutical composition is in solid form, for example the pharmaceutical composition is lyophilized.

[0396] In other embodiments, provided herein are kits comprising a CasX protein and one or a plurality of CasX gNA of any of the embodiments of the disclosure comprising a targeting sequence specific for a PCSK9 gene and a suitable container (for example a tube, vial or plate). In exemplary embodiments, a kit of the disclosure comprises a CasX variant of any one of SEQ ID NOS: 49-160, 439, 441, 443, 445, 447-460, 472, 474, 476, 478, 480, 482, 484, 486, 488, 490.

[0397] In some embodiments, the kit comprises a gNA or a vector encoding a gNA, wherein the gNA comprises a sequence selected from the group consisting of SEQ ID NOS: 247-303, 315-436, 612-2100, or 2286-13861. In some embodiments, the gNA comprises a sequence selected from the group consisting of SEQ ID NOS: 2101-2285. In some embodiments, the gNA comprises a sequence selected from the group consisting of SEQ ID NOS: 2236, 2237, 2238, 2241, 2244, 2248, 2249, and 2259-2285.

[0398] In certain embodiments, provided herein are kits comprising a CasX protein and gNA editing pair comprising a CasX variant protein of SEQ ID NOS: 49-160, 439, 441, 443, 445, 447-460, 472, 474, 476, 478, 480, 482, 484, 486, 488, 490 as set forth in Tables 3, 5, 6, 7 and 9 and a gNA variant as described herein (e.g., SEQ ID NOs: 2101-2285). In exemplary embodiments, a kit of the disclosure comprises a CasX and gNA editing pair, wherein the CasX variant comprises of any one of SEQ ID NOS: 49-160, 439, 441, 443, 445, 447-460, 472, 474, 476, 478, 480, 482, 484, 486, 488, 490. In some embodiments, the gNA of the gene editing pair comprises any one of SEQ ID NOS: 247-303, 315-436, 612-2100, or 2286-13861. In some embodiments, the gNA of the gene editing pair comprises a scaffold sequence of any one of SEQ ID NOS: 2101-2285 and a targeting sequence of any one of SEQ ID NOS: 247-303, 315-436, 612-2100, or 2286-13861. In some embodiments, the gNA of the gene editing pair comprises a scaffold sequence of any one of SEQ ID NOS: 2236, 2237, 2238, 2241, 2244, 2248, 2249, or 2259-2285 and a targeting sequence of any one of SEQ ID NOS: 247-303, 315-436, 612-2100, or 2286-13861.

[0399] In some embodiments, the kit further comprises a buffer, a nuclease inhibitor, a protease inhibitor, a liposome, a therapeutic agent, a label, a label visualization reagent, or any combination of the foregoing. In some embodiments, the kit further comprises a pharmaceutically acceptable carrier, diluent or excipient.

[0400] In some embodiments, the kit comprises appropriate control compositions for gene modifying applications, and instructions for use.

[0401] In some embodiments, the kit comprises a vector comprising a sequence encoding a CasX protein of the disclosure, a CasX gNA of the disclosure, optionally a donor template, or a combination thereof.

### IX. Enumerated Embodiments

[0402] The present description sets forth numerous exemplary configurations, methods, parameters, and the like. It should be recognized, however, that such description is not intended as a limitation on the scope of the present disclosure, but is instead provided as a description of exemplary embodiments. Embodiments of the present subject matter described above may be beneficial alone or in combination, with one or more other aspects or embodiments. Without limiting the foregoing description, certain non-limiting embodiments of the disclosure are provided below. As will be apparent to those of skill in the art upon reading this disclosure, each of the individually numbered embodiments may be used or combined with any of the preceding or following individually numbered embodiments. This is intended to provide support for all such combinations of embodiments and is not limited to combinations of embodiments explicitly provided below.

[0403] The inventions may be defined by reference to the following enumerated, illustrative embodiments:

[0404] Embodiment 1. A CasX:gNA system comprising a CasX protein and a guide nucleic acid (gNA), wherein the gNA comprises a targeting sequence complementary to a target nucleic acid sequence comprising a proprotein convertase subtilisin/kexin Type 9 (PCSK9) gene.

[0405] Embodiment 2. The CasX:gNA system of Embodiment 1, wherein the PCSK9 gene comprises one or more mutations.

[0406] Embodiment 3. The CasX:gNA system of Embodiment 1 or Embodiment 2, wherein the PCSK9 gene encodes a PCSK9 protein comprising one or more mutations.

[0407] Embodiment 4. The CasX:gNA system of Embodiment 3, wherein the one or more mutations comprise amino acid substitutions selected from the group consisting of S127R, D129G, F216L, D374H, and D374Y relative to the sequence of SEQ ID NO: 33.

[0408] Embodiment 5. The CasX:gNA system of any one of Embodiments 2-4, wherein the mutation is a gain-of-function mutation.

[0409] Embodiment 6. The CasX:gNA system of any one of the preceding Embodiments, wherein the gNA is a guide RNA (gRNA).

[0410] Embodiment 7. The CasX:gNA system of any one of Embodiments 1-6, wherein the gNA is a guide DNA (gDNA).

[0411] Embodiment 8. The CasX:gNA system of any one of Embodiments 1-6, wherein the gNA is a chimera comprising DNA and RNA.

[0412] Embodiment 9. The CasX:gNA system of any one of Embodiments 1-8, wherein the gNA is a single-molecule gNA (sgNA).

[0413] Embodiment 10. The CasX:gNA system of any one of Embodiments 1-8, wherein the gNA is a dual-molecule gNA (dgNA).

[0414] Embodiment 11. The CasX:gNA system of any one of Embodiments 1-10, wherein the targeting sequence of the gNA is complementary to a sequence comprising one or more single nucleotide polymorphisms (SNPs) of the PCSK9 gene.

[0415] Embodiment 12. The CasX:gNA system of any one of Embodiments 1-10, wherein the targeting sequence of the gNA comprises a sequence selected from the group consisting of SEQ ID NOS: 247-303, 315-436, 612-2100, and 2286-13861.

[0416] Embodiment 13. The CasX:gNA system of any one of Embodiments 1-10, wherein the targeting sequence of the gNA comprises a sequence of SEQ ID NOS: 247-303, 315-436, 612-2100, or 2286-13861 with a single nucleotide removed from the 3′ end of the sequence.

[0417] Embodiment 14. The CasX:gNA system of any one of Embodiments 1-10, wherein the targeting sequence of the gNA comprises a sequence of SEQ ID NOS: 247-303, 315-436, 612-2100, or 2286-13861 with two nucleotides removed from the 3′ end of the sequence.

[0418] Embodiment 15. The CasX:gNA system of any one of Embodiments 1-10, wherein the targeting sequence of the gNA comprises a sequence of SEQ ID NOS: 247-303, 315-436, 612-2100, or 2286-13861 with three nucleotides removed from the 3′ end of the sequence.

[0419] Embodiment 16. The CasX:gNA system of any one of Embodiments 1-10, wherein the targeting sequence of the gNA comprises a sequence of SEQ ID NOS: 247-303, 315-436, 612-2100, or 2286-13861 with four nucleotides removed from the 3′ end of the sequence.

[0420] Embodiment 17. The CasX:gNA system of any one of Embodiments 1-10, wherein the targeting sequence of the gNA comprises a sequence of SEQ ID NOS: 247-303, 315-436, 612-2100, or 2286-13861 with five nucleotides removed from the 3′ end of the sequence.

[0421] Embodiment 18. The CasX:gNA system of any one of Embodiments 1-10, wherein the targeting sequence of the gNA comprises a sequence having at least about 65%, at least about 75%, at least about 85%, or at least about 95% identity to a sequence selected from the group consisting of SEQ ID NOS: 247-303, 315-436, 612-2100, and 2286-13861.

[0422] Embodiment 19. The CasX:gNA system of any one of Embodiments 1-10, wherein the targeting sequence of the gNA comprises a sequence having one or more single nucleotide polymorphisms (SNP) relative to a sequence of SEQ ID NOS: 247-303, 315-436, 612-2100, or 2286-13861.

[0423] Embodiment 20. The CasX:gNA system of any one of Embodiments 1-19, wherein the targeting sequence of the gNA is complementary to a non-coding region of the PCSK9 gene.

[0424] Embodiment 21. The CasX:gNA system of any one of Embodiments 1-19, wherein the targeting sequence of the gNA is complementary to a coding region of the PCSK9 gene.

[0425] Embodiment 22. The CasX:gNA system of any one of Embodiments 1-19, wherein the targeting sequence of the gNA is complementary to a sequence of a PCSK9 exon.

[0426] Embodiment 23. The CasX:gNA system of any one of Embodiments 1-19, wherein the targeting sequence of the gNA is complementary to a sequence of a PCSK9 intron.

[0427] Embodiment 24. The CasX:gNA system of any one of Embodiments 1-19, wherein the targeting sequence of the gNA is complementary to a sequence of a PCSK9 intron-exon junction.

[0428] Embodiment 25. The CasX:gNA system of any one of Embodiments 1-19, wherein the targeting sequence of the gNA is complementary to a sequence of a PCSK9 regulatory region.

[0429] Embodiment 26. The CasX:gNA system of any one of Embodiments 1-19, wherein the targeting sequence of the gNA is complementary to a sequence of an intergenic region of the PCSK9 gene.

[0430] Embodiment 27. The CasX:gNA system of any one of Embodiments 1-26, further comprising a second gNA, wherein the second gNA has a targeting sequence complementary to a different or overlapping portion of the target nucleic acid sequence compared to the targeting sequence of the gNA of any one of the preceding Embodiments.

[0431] Embodiment 28. The CasX:gNA system of any one of Embodiments 1-27, wherein the gNA has a scaffold comprising a sequence selected from the group consisting of SEQ ID NOS: 4-16 and 2101-2285, or a sequence having at least about 50%, at least about 60%, at least about 70%, at least about 80%, at least about 90%, at least about 95%, at least about 95%, at least about 96%, at least about 97%, at least about 98%, or at least about 99% sequence identity thereto.

[0432] Embodiment 29. The CasX:gNA system of any one of Embodiments 1-28, wherein the gNA has a scaffold comprising a sequence having at least one modification relative to a reference gNA sequence selected from the group consisting of the sequences of SEQ ID NOS: 4-16.

[0433] Embodiment 30. The CasX:gNA system of Embodiment 29, wherein the at least one modification of the reference gNA comprises at least one substitution, deletion, or insertion of a nucleotide of the gNA sequence.

[0434] Embodiment 31. The CasX:gNA system of any one of Embodiments 1-30, wherein the gNA is chemically modified.

[0435] Embodiment 32. The CasX:gNA system of any one of Embodiments 1-31, wherein the CasX protein comprises a reference CasX protein having a sequence of any one of SEQ ID NOS: 1-3, a CasX variant protein having a sequence of SEQ ID NOS: 49-160, 439, 441, 443, 445, 447-460, 472, 474, 476, 478, 480, 482, 484, 486, 488, or 490, or a sequence having at least about 50%, at least about 60%, at least about 70%, at least about 80%, at least about 90%, at least about 95%, at least about 96%, at least about 97%, at least about 98%, or at least about 99% sequence identity thereto.

[0436] Embodiment 33. The CasX:gNA system of Embodiment 32, wherein the CasX protein has binding affinity for a protospacer adjacent motif (PAM) sequence selected from the group consisting of TTC, ATC, GTC, and CTC.

[0437] Embodiment 34. The CasX:gNA system of Embodiment 32 or Embodiment 33, wherein the CasX variant protein comprises at least one modification relative to a reference CasX protein having a sequence selected from SEQ ID NOS:1-3.

[0438] Embodiment 35. The CasX:gNA system of Embodiment 34, wherein the at least one modification comprises at least one amino acid substitution, deletion, or insertion in a domain of the CasX variant protein relative to the reference CasX protein.

[0439] Embodiment 36. The CasX:gNA system of Embodiment 35, wherein the domain is selected from the group consisting of a non-target strand binding (NTSB) domain, a target strand loading (TSL) domain, a helical I domain, a helical II domain, an oligonucleotide binding domain (OBD), and a RuvC DNA cleavage domain.

[0440] Embodiment 37. The CasX:gNA system of any one of Embodiments 32-36, wherein the CasX protein further comprises one or more nuclear localization signals (NLS).

[0441] Embodiment 38. The CasX:gNA system of Embodiment 37, wherein the one or more NLS are selected from the group of sequences consisting of PKKKRKV (SEQ ID NO: 217), KRPAATKKAGQAKKKK (SEQ ID NO: 223), PAAKRVKLD (SEQ ID NO: 224), RQRRNELKRSP (SEQ ID NO: 161), NQSSNFGPMKGGNFGGRSSGPYGGGGQYFAKPRNQGGY (SEQ ID NO: 162), RMRIZFKNKGKDTAELRRRRVEVSVELRKAKKDEQILKRRNV (SEQ ID NO: 163), VSRKRPRP (SEQ ID NO: 164), PPKKARED (SEQ ID NO: 165), PQPKKKPL (SEQ ID NO: 166), SALIKKKKKMAP (SEQ ID NO: 167), DRLRR (SEQ ID NO: 168), PKQKKRK (SEQ ID NO: 169), RKLKKKIKKL (SEQ ID NO: 170), REKKKFLKRR (SEQ ID NO: 171), KRKGDEVDGVDEVAKKKSKK (SEQ ID NO: 172), RKCLQAGMNLEARKTKK (SEQ ID NO: 173), PRPRKIPR (SEQ ID NO: 174), PPRKKRTVV (SEQ ID NO: 175), NLSKKKKRKREK (SEQ ID NO: 176), RRPSRPFRKP (SEQ ID NO: 177), KRPRSPSS (SEQ ID NO: 178), KRGINDRNFWRGENERKTR (SEQ ID NO: 179), PRPPKMARYDN (SEQ ID NO: 180), KRSFSKAF (SEQ ID NO: 181), KLKIKRPVK (SEQ ID NO: 182), PKTRRRPRRSQRKRPPT (SEQ ID NO: 184), RRKKRRPRRKKRR (SEQ ID NO: 187), PKKKSRKPKKKSRK (SEQ ID NO: 188), HKKKHPDASVNFSEFSK (SEQ ID NO: 189), QRPGPYDRPQRPGPYDRP (SEQ ID NO: 190), LSPSLSPLLSPSLSPL (SEQ ID NO: 191), RGKGGKGLGKGGAKRHRK (SEQ ID NO: 192), PKRGRGRPKRGRGR (SEQ ID NO: 193), MSRRRKANPTKLSENAKKLAKEVEN (SEQ ID NO: 185), PKKKRKVPPPPAAKRVKLD (SEQ ID NO: 183), and PKKKRKVPPPPKKKRKV (SEQ ID NO: 194).

[0442] Embodiment 39. The CasX:gNA system of Embodiment 37 or Embodiment 38, wherein the one or more NLS are at the C-terminus of the CasX protein.

[0443] Embodiment 40. The CasX:gNA system of Embodiment 37 or Embodiment 38, wherein the one or more NLS are at the N-terminus of the CasX protein.

[0444] Embodiment 41. The CasX:gNA system of Embodiment 37 or Embodiment 38, wherein the one or more NLS are at the N-terminus and C-terminus of the CasX protein.

[0445] Embodiment 42. The CasX:gNA system of any one of Embodiments 32-41, wherein the CasX variant protein and the gNA exhibit at least one or more improved characteristics as compared to a reference CasX protein and the gNA.

[0446] Embodiment 43. The CasX:gNA system of Embodiment 42, wherein the improved characteristic is selected from the group consisting of improved folding of the CasX protein, improved binding affinity of the CasX protein to the gNA, improved ribonuclear protein complex (RNP) formation, higher percentage of cleavage-competent RNP, improved binding affinity to the target nucleic acid sequence, altered binding affinity to one or more PAM sequences, improved unwinding of the target nucleic acid sequence, increased activity, increased target nucleic acid sequence cleavage rate, improved editing efficiency, improved editing specificity, increased activity of the nuclease, increased target strand loading for double strand cleavage, decreased target strand loading for single strand nicking, decreased off-target cleavage, improved binding of the non-target strand of DNA, improved CasX protein stability, improved protein:guide RNA complex stability, improved protein solubility, improved protein:gNA complex solubility, improved protein yield, improved protein expression, and improved fusion characteristics.

[0447] Embodiment 44. The CasX:gNA system of Embodiment 42 or Embodiment 43, wherein the improved characteristic of the CasX variant protein is at least about 1.1 to about 100,000-fold improved relative to the reference CasX protein of SEQ ID NO: 1, SEQ ID NO: 2, or SEQ ID NO: 3.

[0448] Embodiment 45. The CasX:gNA system of Embodiment 42 or Embodiment 43, wherein the improved characteristic of the CasX variant protein is at least about 10-fold, at least about 100-fold, at least about 1,000-fold, or at least about 10,000-fold improved relative to the reference CasX protein of SEQ ID NO: 1, SEQ ID NO: 2, or SEQ ID NO: 3.

[0449] Embodiment 46. The CasX:gNA system of any one of Embodiments 43-45, wherein the improved characteristic is improved binding affinity to the target nucleic acid sequence.

[0450] Embodiment 47. The CasX:gNA system of any one of Embodiments 43-45, wherein the improved characteristic is increased target nucleic acid sequence cleavage rate.

[0451] Embodiment 48. The CasX:gNA system of any one of Embodiments 43-45, wherein the improved characteristic is increased binding affinity to one or more PAM sequences wherein the one or more PAM sequences are selected from the group consisting of TTC, ATC, GTC, and CTC.

[0452] Embodiment 49. The CasX:gNA system of any one of the preceding Embodiments, wherein the CasX variant protein and the gNA are associated together in an RNP.

[0453] Embodiment 50. The CasX:gNA system of Embodiment 49, wherein the RNP has a higher percentage of cleavage-competent RNP compared to an RNP of a reference CasX and the gNA.

[0454] Embodiment 51. The CasX:gNA system of any one of Embodiments 32-50, wherein the CasX variant protein comprises a nuclease domain having nickase activity.

[0455] Embodiment 52. The CasX:gNA system of Embodiment 51, wherein the CasX variant can cleave only one strand of a double-stranded target nucleic acid molecule.

[0456] Embodiment 53. The CasX:gNA system of any one of Embodiments 1-50, wherein the CasX variant protein comprises a nuclease domain having double-stranded cleavage activity.

[0457] Embodiment 54. The CasX:gNA system of any one of Embodiments 1-41, wherein the CasX protein is a catalytically inactive CasX (dCasX) protein, and wherein the dCasX and the gNA retain the ability to bind to the target nucleic acid sequence.

[0458] Embodiment 55. The CasX:gNA system of Embodiment 54, wherein the dCasX comprises a mutation at residues:

[0459] a) D672, E769, and/or D935 corresponding to the reference CasX protein of SEQ ID NO:1; or

[0460] b) D659, E756 and/or D922 corresponding to the reference CasX protein of SEQ ID NO: 2.

[0461] Embodiment 56. The CasX:gNA system of Embodiment 55, wherein the mutation is a substitution of alanine for the residue.

[0462] Embodiment 57. The CasX:gNA system of any one of Embodiments 1-53, further comprising a donor template nucleic acid.

[0463] Embodiment 58. The CasX:gNA system of Embodiment 57, wherein the donor template comprises a nucleic acid comprising at least a portion of the PCSK9 gene, wherein the PCSK9 gene portion is selected from the group consisting of a PCSK9 exon, a PCSK9 intron, a PCSK9 intron-exon junction, the PCSK9 regulatory region, or a combination thereof.

[0464] Embodiment 59. The CasX:gNA system of Embodiment 57 or Embodiment 58, wherein the donor template comprises homologous arms complementary to sequences flanking a cleavage site in the target nucleic acid.

[0465] Embodiment 60. The CasX:gNA system of Embodiment 57-59, wherein the donor template ranges in size from 10-15,000 nucleotides.

[0466] Embodiment 61. The CasX:gNA system of any one of Embodiments 57-60, wherein the donor template is a single-stranded DNA template or a single stranded RNA template.

[0467] Embodiment 62. The CasX:gNA system of any one of Embodiments 57-60, wherein the donor template is a double-stranded DNA template.

[0468] Embodiment 63. The CasX:gNA system of any one of Embodiments 57-62, wherein the donor template comprises one or more mutations compared to a wild-type PCSK9 gene.

[0469] Embodiment 64. The CasX:gNA system of any one of Embodiments 57-62, wherein the donor template comprises a heterologous sequence compared to a wild-type PCSK9 gene.

[0470] Embodiment 65. The CasX:gNA system of any one of Embodiments 57-62, wherein the donor template comprises all or a portion of a wild-type PCSK9 gene.

[0471] Embodiment 66. A nucleic acid comprising a sequence that encodes the CasX:gNA system of any one of Embodiments 1-56.

[0472] Embodiment 67. The nucleic acid of Embodiment 66, wherein the sequence encoding the CasX protein is codon optimized for expression in a eukaryotic cell.

[0473] Embodiment 68. A vector comprising the nucleic acid of Embodiment 66 or Embodiment 67.

[0474] Embodiment 69. The vector of Embodiment 68, wherein the vector further comprises a promoter.

[0475] Embodiment 70. A vector comprising a donor template, wherein the donor template comprises a nucleic acid comprising at least a portion of a PCSK9 gene, wherein the PCSK9 gene portion is selected from the group consisting of a PCSK9 exon, a PCSK9 intron, a PCSK9 intron-exon junction, and a PCSK9 regulatory region.

[0476] Embodiment 71. The vector of Embodiment 70, wherein the donor template comprises one or more mutations compared to a wild-type PCSK9 gene.

[0477] Embodiment 72. The vector of Embodiment 70 or Embodiment 71, further comprising the nucleic acid of Embodiment 66 or Embodiment 67.

[0478] Embodiment 73. The vector of any one of Embodiments 68-70, wherein the vector is selected from the group consisting of a retroviral vector, a lentiviral vector, an adenoviral vector, an adeno-associated viral (AAV) vector, a herpes simplex virus (HSV) vector, a virus-like particle (VLP), a plasmid, a minicircle, a nanoplasmid, and an RNA vector.

[0479] Embodiment 74. The vector of Embodiment 73, wherein the vector is an AAV vector.

[0480] Embodiment 75. The vector of Embodiment 74, wherein the AAV vector is selected from AAV1, AAV2, AAV3, AAV4, AAV5, AAV6, AAV7, AAV8, AAV9, AAV10, AAV-Rh74, or AAVRh10.

[0481] Embodiment 76. The vector of Embodiment 73, wherein the vector is a retroviral vector.

[0482] Embodiment 77. The vector of Embodiment 73, wherein the vector encoding the VLP comprises one or more nucleic acids encoding a gag polyprotein, the CasX protein of any one of Embodiments 32-56, and the gNA of any one of Embodiments 1-31.

[0483] Embodiment 78. A virus-like particle (VLP) comprising the CasX protein of any one of Embodiments 32-56, and the gNA of any one of Embodiments 1-31.

[0484] Embodiment 79. The VLP of Embodiment 78, wherein the CasX protein and the gNA are associated together in an RNP.

[0485] Embodiment 80. A method of modifying a PCSK9 target nucleic acid sequence, the method comprising contacting the target nucleic acid sequence with a CasX protein and a guide nucleic acid (gNA) comprising a targeting sequence wherein said contacting comprises introducing into a cell:

[0486] a) the CasX:gNA system of any one of Embodiments 1-65;

[0487] b) the nucleic acid of Embodiment 66 or Embodiment 67;

[0488] c) the vector as in any one of Embodiments 68-77;

[0489] d) the VLP of Embodiment 78 or Embodiment 79; or

[0490] e) combinations thereof,

[0491] Embodiment 81. wherein said contacting results in modification of the PCSK9 target nucleic acid sequence by the CasX protein.

[0492] Embodiment 82. The method of Embodiment 80, wherein the CasX protein and the gNA are associated together in a ribonuclear protein complex (RNP).

[0493] Embodiment 83. The method of Embodiment 80 or Embodiment 81, further comprising a second gNA or a nucleic acid encoding the second gNA, wherein the second gNA has a targeting sequence complementary to a different portion of the target nucleic acid sequence or its complement.

[0494] Embodiment 84. The method any one of Embodiments 80-82, wherein the PCSK9 gene comprises a mutation.

[0495] Embodiment 85. The method of Embodiment 83, wherein the mutation is a gain of function mutation.

[0496] Embodiment 86. The method of any one of Embodiments 80-82, wherein the PCSK9 gene comprises a wild-type sequence.

[0497] Embodiment 87. The method of any one of Embodiments 80-85, wherein the modifying comprises introducing a single-stranded break in the target nucleic acid sequence.

[0498] Embodiment 88. The method of any one of Embodiments 80-85, wherein the modifying comprises introducing a double-stranded break in the target nucleic acid sequence.

[0499] Embodiment 89. The method of any one of Embodiments 80-87, wherein the modifying comprises introducing an insertion, deletion, substitution, duplication, or inversion of one or more nucleotides in the target nucleic acid sequence as compared to the wild-type sequence.

[0500] Embodiment 90. The method of any one of Embodiments 80-88, wherein the modifying of the target nucleic acid sequence occurs inside of a cell.

[0501] Embodiment 91. The method of any one of Embodiments 80-89, wherein the modifying of the target nucleic acid sequence occurs in vivo.

[0502] Embodiment 92. The method of any one of Embodiments 80-90, wherein the cell is a eukaryotic cell.

[0503] Embodiment 93. The method of Embodiment 91, wherein the eukaryotic cell is selected from the group consisting of a rodent cell, a mouse cell, a rat cell, a pig cell, a primate cell, a non-human primate cell, and a human cell.

[0504] Embodiment 94. The method of Embodiment 92, wherein the eukaryotic cell is a human cell.

[0505] Embodiment 95. The method of any one of Embodiments 80-94, wherein the cell is selected from the group consisting of a hepatocyte, a cell of the intestine, a cell of the kidney, a cell of the central nervous system, a smooth muscle cell, a macrophage, and an arterial endothelial cell.

[0506] Embodiment 96. The method of any one of Embodiments 80-94, wherein the method further comprises contacting the target nucleic acid sequence with a donor template complementary to at least a portion of a PCSK9 gene, wherein the donor template is inserted into the target nucleic acid sequence to replace all or a portion of the target nucleic acid sequence.

[0507] Embodiment 97. The method of Embodiment 96, wherein the donor template comprises one or more mutations compared to the wild-type PCSK9 gene sequence, and wherein the insertion results in a knock-down or knock-out of the PCSK9 gene.

[0508] Embodiment 98. The method of Embodiment 96, wherein the donor template comprises all or a portion of a wild-type PCSK9 gene sequence, wherein the insertion corrects one or more mutation(s) of the PCSK9 gene.

[0509] Embodiment 99. The method of any one of Embodiments 96-98, wherein the donor template ranges in size from 10-15,000 nucleotides.

[0510] Embodiment 100. The method of any one of Embodiments 96-98, wherein the donor template ranges in size from 100-1,000 nucleotides.

[0511] Embodiment 101. The method of any one of Embodiments 96-100, wherein the donor template is a single-stranded DNA template or a single stranded RNA template.

[0512] Embodiment 102. The method of any one of Embodiments 96-100, wherein the donor template is a double-stranded DNA template.

[0513] Embodiment 103. The method of any one of Embodiments 96-102, wherein the donor template is inserted by homology directed repair (HDR).

[0514] Embodiment 104. The method of any one of Embodiments 80-103, wherein the vector is administered to a subject at a therapeutically effective dose.

[0515] Embodiment 105. The method of Embodiment 104, wherein the subject is selected from the group consisting of mouse, rat, pig, non-human primate, and human.

[0516] Embodiment 106. The method of Embodiment 104, wherein the subject is a human.

[0517] Embodiment 107. The method of any one of Embodiments 80-106, wherein the vector is administered at a dose of at least about 1×1010 vector genomes (vg), or at least about 1×10¹¹ vg, or at least about 1×10¹² vg, or at least about 1×10¹³ vg, or at least about 1×10¹⁴ vg, or at least about 1×10¹⁵ vg, or at least about 1×10¹⁶ vg.

[0518] Embodiment 108. The method of any one of Embodiments 80-106, wherein the vector is administered by a route of administration selected from the group consisting of intravenous, intraportal vein injection, intraperitoneal, intramuscular, subcutaneous, and oral routes.

[0519] Embodiment 109. The method of any one of Embodiments 80-108, comprising further contacting the target nucleic acid sequence with an additional CRISPR protein, or a polynucleotide encoding the additional CRISPR protein.

[0520] Embodiment 110. The method of Embodiment 109, wherein the additional CRISPR protein is a CasX protein having a sequence different from the CasX protein of any of the preceding Embodiments.

[0521] Embodiment 111. The method of Embodiment 109, wherein the additional CRISPR protein is not a CasX protein.

[0522] Embodiment 112. A method of altering a PCSK9 target nucleic acid sequence of a cell, comprising contacting said cell with:

[0523] a) the CasX:gNA system of any one of Embodiments 1-65;

[0524] b) the nucleic acid of Embodiment 66 or Embodiment 67;

[0525] c) the vector of any one of Embodiments 68-77;

[0526] d) the VLP of Embodiment 78 or Embodiment 79; or

[0527] e) combinations thereof.

[0528] Embodiment 113. The method of Embodiment 112, wherein the cell has been modified such that expression of the PCSK9 protein is reduced by at least about 10%, at least about 20%, at least about 30%, at least about 40%, at least about 50%, at least about 60%, at least about 70%, at least about 80%, or at least about 90% in comparison to a cell that has not been modified.

[0529] Embodiment 114. The method of Embodiment 112 or Embodiment 113, wherein the cell has been modified such that the cell does not express a detectable level of the PCSK9 protein.

[0530] Embodiment 115. A population of cells modified by the method of Embodiment 112 or Embodiment 113, wherein the cells have been modified such that at least 10%, at least about 20%, at least about 30%, at least about 40%, at least about 50%, at least about 60%, at least about 70%, at least about 80%, or at least about 90% of the modified cells do not express a detectable level of PCSK9 protein.

[0531] Embodiment 116. The population of cells of Embodiment 115, wherein the cell is a non-primate mammalian cell, a non-human primate cell, or a human cell.

[0532] Embodiment 117. The population of cells of Embodiment 115 or Embodiment 116, wherein the cells are selected from the group consisting of hepatocytes, cells of the intestine, cells of the kidney, cells of the central nervous system, smooth muscle cells, macrophages, and arterial endothelial cells.

[0533] Embodiment 118. A method of treating a PCSK9-related disorder in a subject in need thereof, comprising modifying a PCSK9 gene in a cell of the subject, the modifying comprising either contacting said cell with;

[0534] a) CasX:gNA system of any one of Embodiments 1-65;

[0535] b) the nucleic acid of Embodiment 66 or Embodiment 67;

[0536] c) the vector as in any one of Embodiments 68-77;

[0537] d) the VLP of Embodiment 78 or Embodiment 79; or

[0538] e) combinations thereof.

[0539] Embodiment 119. The method of Embodiment 118, wherein the PCSK9-related disorder is selected from the group consisting of autosomal dominant hypercholesterolemia (ADH), hypercholesterolemia, elevated LDL, atherosclerotic cardiovascular disease, and coronary artery disease.

[0540] Embodiment 120. The method of Embodiment 118 or Embodiment 119, further comprising a second gNA or a nucleic acid encoding the second gNA, wherein the second gNA has a targeting sequence complementary to a different or overlapping portion of the target nucleic acid sequence.

[0541] Embodiment 121. The method of any one of Embodiments 118-120, wherein the modifying introduces one or more mutations in the PCSK9 gene, or wherein expression of the PCSK9 protein is inhibited or suppressed.

[0542] Embodiment 122. The method of any one of Embodiments 118-121, wherein the method comprises contacting the cell with the donor template of any one of Embodiments 57-65.

[0543] Embodiment 123. The method of any one of Embodiments 118-122, wherein the cell is selected from the group consisting of a hepatocyte, a cell of the intestine, a cell of the kidney, a cell of the central nervous system, a smooth muscle cell, a macrophage, and arterial endothelial cell.

[0544] Embodiment 124. The method of any one of Embodiments 118-123, wherein the vector is administered to a subject at a therapeutically effective dose.

[0545] Embodiment 125. The method of Embodiment 124, wherein the subject is selected from the group consisting of mouse, rat, pig, non-human primate, and human.

[0546] Embodiment 126. The method of Embodiment 124, wherein the subject is a human.

[0547] Embodiment 127. The method of any one of Embodiments 118-126, wherein the vector is administered to the subject at a dose of at least about 1×10¹⁰ vector genomes (vg), or at least about 1×10¹¹ vg, or at least about 1×10¹² vg, or at least about 1×10¹³ vg, or at least about 1×10¹⁴ vg, or at least about 1×10¹⁵ vg, or at least about 1×10¹⁶ vg.

[0548] Embodiment 128. The method of any one of Embodiments 118-127, wherein the vector is administered by a route of administration selected from the group consisting of intravenous, intraportal vein injection, intraperitoneal, intramuscular, subcutaneous, and oral routes.

[0549] Embodiment 129. The method of any one of Embodiments 118-128, comprising further contacting the target nucleic acid sequence with an additional CRISPR protein, or a polynucleotide encoding the additional CRISPR protein.

[0550] Embodiment 130. The method of Embodiment 129, wherein the additional CRISPR protein is a CasX protein having a sequence different from the CasX of any of the preceding Embodiments.

[0551] Embodiment 131. The method of Embodiment 130, wherein the additional CRISPR protein is not a CasX protein.

[0552] Embodiment 132. The method of any one of Embodiments 118-131, wherein the method further comprises administering a chemotherapeutic agent.

[0553] Embodiment 133. The method of any one of Embodiments 118-132, wherein the method results in improvement in at least one clinically-relevant endpoint selected from the group consisting of percent change from baseline in LDL-cholesterol, decrease in plaque atheroma volume, reduction in in coronary plaque, reduction in atherosclerotic cardiovascular disease (ASCVD), cardiovascular death, nonfatal myocardial infarction, ischemic stroke, nonfatal stroke, coronary revascularization, and unstable angina.

[0554] Embodiment 134. The method of any one of Embodiments 118-132, wherein the method results in improvement in at least two clinically-relevant endpoints selected from the group consisting of percent change from baseline in LDL-cholesterol, decrease in plaque atheroma volume, reduction in in coronary plaque, reduction in atherosclerotic cardiovascular disease (ASCVD), cardiovascular death, nonfatal myocardial infarction, ischemic stroke, nonfatal stroke, coronary revascularization, or unstable angina.

[0555] The following Examples are merely illustrative and are not meant to limit any aspects of the present disclosure in any way.

### EXAMPLES

### Example 1: Creation, Expression and Purification of CasX Stx2

### 1. Growth and Expression

[0556] An expression construct for CasX Stx2 (also referred to herein as CasX2), derived from Planctomycetes (comprising the CasX amino acid sequence of SEQ ID NO: 2 and encoded by the sequence of SEQ ID NO: 437, below), was constructed from gene fragments (Twist Biosciences) that were codon optimized for E. coli. The assembled construct contains a TEV-cleavable, C-terminal, TwinStrep tag and was cloned into a pBR322-derivative plasmid backbone containing an ampicillin resistance gene. The expression construct was transformed into chemically competent BL21* (DE3) E. coli and a starter culture was grown overnight in LB broth supplemented with carbenicillin at 37° C., 200 RPM, in UltraYield Flasks (Thomson Instrument Company). The following day, this culture was used to seed expression cultures at a 1:100 ratio (starter culture:expression culture). Expression cultures were Terrific Broth (Novagen) supplemented with carbenicillin and grown in UltraYield flasks at 37° C., 200 RPM. Once the cultures reached an optical density (OD) of 2, they were chilled to 16° C. and IPTG (isopropyl β-D-1-thiogalactopyranoside) was added to a final concentration of 1 mM, from a 1 M stock. The cultures were induced at 16° C., 200 RPM for 20 hours before being harvested by centrifugation at 4,000×g for 15 minutes, 4° C. The cell paste was weighed and resuspended in lysis buffer (50 mM HEPES-NaOH, 250 mM NaCl, 5 mM MgCl₂, 1 mM TCEP, 1 mM benzamidine-HCL, 1 mM PMSF, 0.5% CHAPS, 10% glycerol, pH 8) at a ratio of 5 mL of lysis buffer per gram of cell paste. Once resuspended, the sample was frozen at −80° C. until purification.

TABLE 4
DNA sequence of CasX Stx2 construct

| Construct | DNA Sequence |
|---|---|
| SV40 NLS-CasX-SV40 | ATGGCTCCGAAGAAGAAGCGAAAGGTCAGCCAGGAAATTAAACGCATCAA |
| NLS-TEV | CAAGATCCGCCGTCGTCTGGTAAAAGACAGCAATACGAAAAAAGCCGGAA |
| cleavage site- | AAACCGGTCCGATGAAAACGCTGCTGGTGCGCGTGATGACGCCGGATCTC |
| TwinStrep tag | CGCGAACGTCTTGAGAATTTGCGTAAGAAACCTGAAAATATTCCGCAACC |
| | GATTTCTAACACCTCGCGCGCCAATCTGAATAAACTGCTGACCGATTACA |
| | CCGAAATGAAGAAAGCGATTCTGCACGTTTACTGGGAAGAGTTCCAGAAA |
| | GACCCGGTCGGTCTGATGAGCCGCGTTGCGCAACCTGCGCCGAAAAATAT |
| | CGATCAGCGCAAGTTAATCCCGGTTAAAGATGGTAATGAACGTTTAACCT |
| | CCAGCGGCTTTGCCTGCAGTCAGTGCTGCCAGCCACTTTATGTTTATAAA |
| | CTTGAACAGGTTAACGATAAAGGGAAACCCCATACCAATTATTTCGGCCG |
| | CTGCAATGTCAGCGAACATGAACGCCTGATTTTGTTAAGCCCGCATAAAC |
| | CGGAAGCGAATGACGAACTGGTGACCTATTCCCTGGGTAAATTTGGTCAG |
| | CGGGCGCTGGATTTTTACAGCATTCATGTGACGCGGGAAAGTAACCATCC |
| | GGTAAAGCCACTGGAACAAATCGGCGGTAACAGCTGCGCCTCTGGCCCGG |
| | TTGGCAAAGCGCTTAGCGATGCCTGTATGGGCGCGGTGGCGAGCTTTCTG |
| | ACAAAATACCAGGATATTATCCTGGAGCATCAGAAGGTGATCAAAAAGAA |
| | CGAGAAACGTCTGGCAAATTTAAAGGATATTGCCTCCGCTAACGGCCTGG |
| | CGTTCCCGAAGATTACCTTACCGCCGCAGCCGCACACCAAAGAAGGTATC |
| | GAAGCGTATAACAACGTTGTTGCCCAGATCGTCATCTGGGTGAATCTCAA |
| | CCTGTGGCAAAAACTGAAAATTGGTCGTGATGAAGCAAAACCGTTGCAGC |
| | GACTGAAAGGATTCCCGTCGTTTCCGCTGGTTGAACGACAGGCGAACGAA |
| | GTGGATTGGTGGGATATGGTTTGTAACGTCAAAAAATTGATCAACGAAAA |
| | AAAGGAAGATGGCAAAGTTTTCTGGCAAAATCTGGCGGGTTACAAACGTC |
| | AGGAGGCGTTGCTTCCGTATCTCTCTTCAGAAGAAGATCGCAAAAAAGGC |
| | AAGAAGTTTGCTCGCTATCAGTTTGGCGATTTATTACTGCATCTGGAAAA |
| | AAAACACGGCGAAGACTGGGGCAAAGTGTACGATGAAGCCTGGGAGCGTA |
| | TCGACAAAAAAGTGGAAGGTTTGTCGAAACATATTAAACTCGAAGAAGAG |
| | CGCCGCAGTGAAGATGCGCAGTCAAAAGCAGCGCTGACGGACTGGTTACG |
| | TGCGAAAGCCAGTTTTGTGATTGAAGGATTAAAAGAAGCTGATAAAGATG |
| | AATTTTGCCGTTGCGAACTGAAACTGCAAAAATGGTATGGCGACCTGCGC |
| | GGCAAACCGTTCGCCATTGAGGCAGAAAATAGCATCCTTGATATCTCCGG |
| | TTTCAGCAAACAATATAACTGCGCGTTTATTTGGCAGAAAGACGGCGTGA |
| | AAAAGCTTAACCTGTATCTGATCATTAACTATTTTAAAGGCGGGAAACTG |
| | CGTTTCAAGAAAATCAAGCCGGAAGCATTTGAAGCCAATCGTTTTTATAC |
| | CGTTATTAATAAAAAAAGCGGTGAAATCGTGCCGATGGAAGTTAATTTTA |
| | ACTTTGATGATCCGAACTTGATTATTCTGCCGCTGGCATTCGGTAAACGG |
| | CAGGGCCGTGAGTTTATCTGGAACGACCTGTTATCGCTGGAAACGGGCAG |
| | CCTGAAATTAGCCAACGGTCGCGTCATTGAAAAAACGCTCTACAACCGCC |
| | GCACCCGCCAGGATGAGCCGGCACTGTTTGTCGCGCTGACCTTTGAACGG |
| | CGTGAAGTCCTCGATAGCAGCAACATCAAACCAATGAACCTTATCGGTAT |
| | TGATCGTGGTGAAAACATTCCTGCCGTTATCGCCCTGACTGATCCAGAAG |
| | GCTGCCCGCTTTCTCGCTTCAAAGATTCACTGGGCAACCCGACCCATATC |
| | CTCCGTATTGGCGAGAGCTACAAAGAGAAACAGCGTACCATTCAGGCAGC |
| | CAAAGAAGTGGAGCAGCGTCGCGCGGGCGGCTATAGCCGTAAATATGCCA |
| | GCAAAGCTAAAAACCTGGCGGATGACATGGTGCGTAACACGGCGCGCGAT |
| | TTGCTGTACTACGCCGTCACCCAGGACGCGATGCTGATTTTTGAGAACCT |
| | CTCCCGCGGTTTTGGGCGTCAGGGTAAACGCACGTTTATGGCGGAACGCC |
| | AGTATACGCGTATGGAGGACTGGCTGACCGCGAAGCTGGCCTATGAAGGC |
| | TTGCCGTCTAAAACTTACCTGAGCAAGACCCTGGCTCAGTACACCAGTAA |
| | AACCTGTAGTAATTGCGGCTTTACCATCACCAGCGCCGATTATGACCGCG |
| | TGCTGGAAAAGCTGAAGAAAACCGCCACCGGCTGGATGACCACCATCAAT |
| | GGTAAAGAGCTTAAAGTCGAAGGGCAGATTACTTATTACAACCGTTATAA |
| | GCGGCAAAACGTGGTGAAAGATCTGTCGGTTGAGCTGGACCGTTTGTCTG |
| | AAGAAAGCGTGAACAATGATATCAGCTCCTGGACCAAAGGTCGTTCCGGC |
| | GAAGCGTTAAGTCTGTTGAAAAAGCGCTTTAGCCATCGCCCGGTGCAGGA |
| | AAAATTCGTTTGCCTGAACTGTGGCTTCGAAACCCACGCCGACGAGCAAG |
| | CGGCGCTCAATATTGCGCGTAGCTGGCTGTTCCTGCGCAGCCAGGAATAT |
| | AAAAAATATCAAACCAACAAAACAACTGGCAATACCGAGAAGCGTGCCTT |
| | TGTTGAAACCTGGCAGAGCTTCTATCGCAAAAAACTGAAAGAGGTCTGGA |
| | AACCGGCGGTAGCGCCAAAGAAAAAACGCAAAGTGAGCGAAAATCTTTAT |
| | TTTCAAGGTAGCGCATGGAGTCATCCTCAATTCGAGAAAGGTGGAGGTTC |
| | TGGCGGTGGATCGGGAGGTTCAGCGTGGAGCCACCCGCAGTTCGAAAAAG |
| | GAAGGGGATCCGGCTGCTAA (SEQ ID NO: 437) |

### 2. Purification

[0557] Frozen samples were thawed overnight at 4° C. with magnetic stirring. The viscosity of the resulting lysate was reduced by sonication and lysis was completed by homogenization in three passes at 17 k PSI using an Emulsiflex C3 (Avestin). Lysate was clarified by centrifugation at 50,000×g, 4° C., for 30 minutes and the supernatant was collected. The clarified supernatant was applied to a Heparin 6 Fast Flow column (GE Life Sciences) by gravity flow. The column was washed with 5 CV of Heparin Buffer A (50 mM HEPES-NaOH, 250 mM NaCl, 5 mM MgCl₂, 1 mM TCEP, 10% glycerol, pH 8), then with 5 CV of Heparin Buffer B (Buffer A with the NaCl concentration adjusted to 500 mM). Protein was eluted with 5 CV of Heparin Buffer C (Buffer A with the NaCl concentration adjusted to 1 M), collected in fractions. Fractions were assayed for protein by Bradford Assay and protein-containing fractions were pooled. The pooled heparin eluate was applied to a Strep-Tactin XT Superflow column (IBA Life Sciences) by gravity flow. The column was washed with 5 CV of Strep Buffer (50 mM HEPES-NaOH, 500 mM NaCl, 5 mM MgCl₂, 1 mM TCEP, 10% glycerol, pH 8). Protein was eluted from the column using 5 CV of Strep Buffer with 50 mM D-Biotin added and collected in fractions. CasX-containing fractions were pooled, concentrated at 4° C. using a 30 kDa cut-off spin concentrator, and purified by size exclusion chromatography on a Superdex 200 pg column (GE Life Sciences). The column was equilibrated with SEC Buffer (25 mM sodium phosphate, 300 mM NaCl, 1 mM TCEP, 10% glycerol, pH 7.25) operated by an AKTA Pure FPLC system (GE Life Sciences). CasX-containing fractions that eluted at the appropriate molecular weight were pooled, concentrated at 4° C. using a 30 kDa cut-off spin concentrator, aliquoted, and snap-frozen in liquid nitrogen before being stored at −80° C.

### 3. Results

[0558] Samples from throughout the purification were resolved by SDS-PAGE and visualized by colloidal Coomassie staining, as shown in FIG. 1 and FIG. 3. In FIG. 1, the lanes, from left to right, are: molecular weight standards, Pellet: insoluble portion following cell lysis, Lysate: soluble portion following cell lysis, Flow Thru: protein that did not bind the Heparin column, Wash: protein that eluted from the column in wash buffer, Elution: protein eluted from the heparin column with elution buffer, Flow Thru: Protein that did not bind the StrepTactinXT column, Elution: protein eluted from the StrepTactin XT column with elution buffer, Injection: concentrated protein injected onto the s200 gel filtration column, Frozen: pooled fractions from the s200 elution that have been concentrated and frozen. In FIG. 3, the lanes from right to left, are the injection (sample of protein injected onto the gel filtration column,) molecular weight markers, lanes 3-9 are samples from the indicated elution volumes. Results from the gel filtration are shown in FIG. 2. The 68.36 mL peak corresponds to the apparent molecular weight of CasX and contained the majority of CasX protein. The average yield was 0.75 mg of purified CasX protein per liter of culture, with 75% purity, as evaluated by colloidal Coomassie staining.

### Example 2: CasX Construct 119, 438 and 457

[0559] In order to generate the CasX 119, 438, and 457 constructs (sequences in Table 5), the codon-optimized CasX 37 construct (based on the Stx2 construct of Example 1, encoding Planctomycetes CasX SEQ ID NO:2, with a A708K substitution and a [P793] deletion with fused NLS, and linked guide and non-targeting sequences) was cloned into a mammalian expression plasmid (pStX; see FIG. 4) using standard cloning methods. To build CasX 119, the CasX 37 construct DNA was PCR amplified in two reactions using Q5 DNA polymerase (New England BioLabs Cat #M0491L) using primers oIC539 and oIC88 as well as oIC87 and oIC540 respectively (see FIG. 5). To build CasX 457, the CasX 365 construct DNA was PCR amplified in four reactions using Q5 DNA polymerase using primers oIC539 and oIC212, oIC211 and oIC376, oIC375 and oIC551, and oIC550 and oIC540 respectively. To build CasX 438, the CasX 119 construct DNA was PCR amplified in four reactions using Q5 DNA polymerase using primers oIC539 and oIC689, oIC688 and oIC376, oIC375 and oIC551, and oIC550 and oIC540 respectively. The resulting PCR amplification products were then purified using Zymoclean DNA clean and concentrator (Zymo Research Cat #4014) and the pStX backbone was digested using XbaI and SpeI. The digested backbone fragment was purified by gel extraction from a 1% agarose gel (Gold Bio Cat #A-201-500) using Zymoclean Gel DNA Recovery Kit (Zymo Research Cat #D4002) and the three fragments were then pieced together using Gibson assembly (New England BioLabs Cat #E2621S). Assembled products in the pStx34 were transformed into chemically-competent or electro-competent Turbo Competent E. coli bacterial cells, plated on LB-Agar plates (LB: Teknova Cat #L9315, Agar: Quartzy Cat #214510) containing carbenicillin. Individual colonies were picked and miniprepped using Qiagen Qiaprep spin Miniprep Kit (Qiagen Cat #27104) following the manufacturer's protocol. The resultant plasmids were sequenced using Sanger sequencing. Sequences encoding the targeting sequences that target the gene of interest were designed based on CasX PAM locations. Targeting sequence DNA was ordered as single-stranded DNA (ssDNA) oligos (Integrated DNA Technologies) consisting of the targeting sequence and the reverse complement of this sequence. These two oligos were annealed together and cloned into pStX individually or in bulk by Golden Gate assembly using T4 DNA Ligase (New England BioLabs Cat #M0202L) and an appropriate restriction enzyme for the plasmid. Golden Gate products were transformed into chemically or electro-competent cells such as NEB Turbo competent E. coli (NEB Cat #C29841), plated on LB-Agar plates (LB: Teknova Cat #L9315, Agar: Quartzy Cat #214510) containing carbenicillin. Individual colonies were picked and miniprepped using Qiagen Qiaprep spin Miniprep Kit (Qiagen Cat #27104) and the resultant plasmids were sequenced using Sanger sequencing. SaCas9 and SpyCas9 control plasmids were prepared similarly to pStX plasmids described above, with the protein and guide regions of pStX exchanged for the respective protein and guide. The expression and recovery of the CasX 119 and 457 proteins was performed using the general methodologies of Example 1 (however the DNA sequences were codon optimized for expression in E. coli). The results of analytical assays for CasX 119 are shown in FIGS. 6-8. The average yield of the CasX 119 was 1.56 mg of purified CasX protein per liter of culture at 75% purity, as evaluated by colloidal Coomassie staining. FIG. 6 shows an SDS-PAGE gel of purification samples, visualized on a Bio-Rad Stain-Free™ gel, as described. The lanes, from left to right, are: Pellet: insoluble portion following cell lysis, Lysate: soluble portion following cell lysis, Flow Thru: protein that did not bind the Heparin column, Wash: protein that eluted from the column in wash buffer, Elution: protein eluted from the heparin column with elution buffer, Flow Thru: Protein that did not bind the StrepTactinXT column, Elution: protein eluted from the StrepTactin XT column with elution buffer, Injection: concentrated protein injected onto the s200 gel filtration column, Frozen: pooled fractions from the s200 elution that have been concentrated and frozen.

[0560] FIG. 7 shows the chromatogram of Superdex 200 16/600 pg Gel Filtration, as described. Gel filtration run of CasX variant 119 protein plotted as 280 nm absorbance against elution volume. The 65.77 mL peak corresponds to the apparent molecular weight of CasX variant 119 and contained the majority of CasX variant 119 protein. FIG. 8 shows an SDS-PAGE gel of gel filtration samples, stained with colloidal Coomassie, as described. Samples from the indicated fractions were resolved by SDS-PAGE and stained with colloidal Coomassie. From right to left, Injection: sample of protein injected onto the gel filtration column, molecular weight markers, lanes 3-10: samples from the indicated elution volumes.

TABLE 5
Sequences of CasX 119, 438 and 457

| Construct | DNA Sequence | Amino Acid Sequence |
|---|---|---|
| CasX 119 | (SEQ ID NO: 438) | QEIKRINKIRRRLVKDSNTKKAGKTGPMKTLLVRVMTPDLRERLEN |
| | | LRKKPENIPQPISNTSRANLNKLLTDYTEMKKAILHVYWEEFQKDP |
| | | VGLMSRVAQPAPKNIDQRKLIPVKDGNERLTSSGFACSQCCQPLYV |
| | | YKLEQVNDKGKPHTNYFGRCNVSEHERLILLSPHKPEANDELVTYS |
| | | LGKFGQRALDFYSIHVTRESNHPVKPLEQIGGNSCASGPVGKALSD |
| | | ACMGAVASFLTKYQDIILEHQKVIKKNEKRLANLKDIASANGLAFP |
| | | KITLPPQPHTKEGIEAYNNVVAQIVIWVNLNLWQKLKIGRDEAKPL |
| | | QRLKGFPSFPLVERQANEVDWWDMVCNVKKLINEKKEDGKVFWQNL |
| | | AGYKRQEALRPYLSSEEDRKKGKKFARYQFGDLLLHLEKKHGEDWG |
| | | KVYDEAWERIDKKVEGLSKHIKLEEERRSEDAQSKAALTDWLRAKA |
| | | SFVIEGLKEADKDEFCRCELKLQKWYGDLRGKPFAIEAENSILDIS |
| | | GFSKQYNCAFIWQKDGVKKLNLYLIINYFKGGKLRFKKIKPEAFEA |
| | | NRFYTVINKKSGEIVPMEVNFNFDDPNLIILPLAFGKRQGREFIWN |
| | | DLLSLETGSLKLANGRVIEKTLYNRRTRQDEPALFVALTFERREVL |
| | | DSSNIKPMNLIGIDRGENIPAVIALTDPEGCPLSRFKDSLGNPTHI |
| | | LRIGESYKEKQRTIQAKKEVEQRRAGGYSRKYASKAKNLADDMVRN |
| | | TARDLLYYAVTQDAMLIFENLSRGFGRQGKRTFMAERQYTRMEDWL |
| | | TAKLAYEGLSKTYLSKTLAQYTSKTCSNCGFTITSADYDRVLEKLK |
| | | KTATGWMTTINGKELKVEGQITYYNRYKRQNVVKDLSVELDRLSEE |
| | | SVNNDISSWTKGRSGEALSLLKKRFSHRPVQEKFVCLNCGFETHAD |
| | | EQAALNIARSWLFLRSQEYKKYQTNKTTGNTDKRAFVETWQSFYRK |
| | | KLKEVWKPAV (SEQ ID NO: 439) |
| CasX 457 | (SEQ ID NO: 440) | QEIKRINKIRRRLVKDSNTKKAGKTGPMKTLLVRVMTPDLRERLEN |
| | | LRKKPENIPQPISNTSRANLNKLLTDYTEMKKAILHVYWEEFQKDP |
| | | VGLMSRVAQPAPKNIDQRKLIPVKDGNERLTSSGFACSQCCQPLYV |
| | | YKLEQVNDKGKPHTNYFGRCNVSEHERLILLSPHKPEANDELVTYS |
| | | LGKFGQRALDFYSIHVTRESNHPVKPLEQIGGNSCASGPVGKALSD |
| | | ACMGAVASFLTKYQDIILEHKKVIKKNEKRLANLKDIASANGLAFP |
| | | KITLPPQPHTKEGIEAYNNVVAQIVIWVNLNLWQKLKIGRDEAKPL |
| | | QRLKGFPSFPLVERQANEVDWWDMVCNVKKLINEKKEDGKVFWQNL |
| | | AGYKRQEALRPYLSSPEDRKKGKKFARYQLGDLLLHLEKKHGEDWG |
| | | KVYDEAWERIDKKVEGLSKHIKLEEERRSEDAQSKAALTDWLRAKA |
| | | SFVIEGLKEADKDEFCRCELKLQKWYGDLRGKPFAIEAENSILDIS |
| | | GFSKQYNCAFIWQKDGVKKLNLYLIINYFKGGKLRFKKIKPEAFEA |
| | | NRFYTVINKKSGEIVPMEVNFNFDDPNLIILPLAFGKRQGREFIWN |
| | | DLLSLETGSLKLANGRVIEKPLYNRRTRQDEPALFVALTFERREVL |
| | | DSSNIKPMNLIGVDRGENIPAVIALTDPEGCPLSRFKDSLGNPTHI |
| | | LRIGESYKEKQRTIQAKKEVEQRRAGGYSRKYASKAKNLADDMVRN |
| | | TARDLLYYAVTQDAMLIFENLSRGFGRQGKRTFMAERQYTRMEDWL |
| | | TAKLAYEGLSKTYLSKTLAQYTSKTCSNCGFTITSADYDRVLEKLK |
| | | KTATGWMTTINGKELKVEGQITYYNRRKRQNVVKDLSVELDRLSEE |
| | | SVNNDISSWTKGRSGEALSLLKKRFSHRPVQEKFVCLNCGFETHAD |
| | | EQAALNIARSWLFLRSQEYKKYQTNKTTGNTDKRAFVETWQSFYRK |
| | | KLKEVWKPAV (SEQ ID NO: 441) |
| CasX 438 | (SEQ ID NO: 442) | QEIKRINKIRRRLVKDSNTKKAGKTGPMKTLLVRVMTPDLRERLEN |
| | | LRKKPENIPQPISNTSRANLNKLLTDYTEMKKAILHVYWEEFQKDP |
| | | VGLMSRVAQPAPKNIDQRKLIPVKDGNERLTSSGFACSQCCQPLYV |
| | | YKLEQVNDKGKPHTNYFGRCNVSEHERLILLSPHKPEANDELVTYS |
| | | LGKFGQRALDFYSIHVTRESNHPVKPLEQIGGNSCASGPVGKALSD |
| | | ACMGAVASFLTKYQDIILEHQKVIKKNEKRLANLKDIASANGLAFP |
| | | KITLPPQPHTKEGIEAYNNVVAQIVIWVNLNLWQKLKIGRDEAKPL |
| | | QRLKGFPSFPLVERQANEVDWWDMVCNVKKLINEKKEDGKVFWQNL |
| | | AGYKRQEALRPYLSSEEDRKKGKKFARYQLGDLLKHLEKKHGEDWG |
| | | KVYDEAWERIDKKVEGLSKHIKLEEERRSEDAQSKAALTDWLRAKA |
| | | SFVIEGLKEADKDEFCRCELKLQKWYGDLRGKPFAIEAENSILDIS |
| | | GFSKQYNCAFIWQKDGVKKLNLYLIINYFKGGKLRFKKIKPEAFEA |
| | | NRFYTVINKKSGEIVPMEVNFNFDDPNLIILPLAFGKRQGREFIWN |
| | | DLLSLETGSLKLANGRVIEKTLYNRRTRQDEPALFVALTFERREVL |
| | | DSSNIKPMNLIGVDRGENIPAVIALTDPEGCPLSRFKDSLGNPTHI |
| | | LRIGESYKEKQRTIQAKKEVEQRRAGGYSRKYASKAKNLADDMVRN |
| | | TARDLLYYAVTQDAMLIFENLSRGFGRQGKRTFMAERQYTRMEDWL |
| | | TAKLAYEGLSKTYLSKTLAQYTSKTCSNCGFTITSADYDRVLEKLK |
| | | KTATGWMTTINGKELKVEGQITYYNRRKRQNVVKDLSVELDRLSEE |
| | | SVNNDISSWTKGRSGEALSLLKKRFSHRPVQEKFVCLNCGFETHAD |
| | | EQAALNIARSWLFLRSQEYKKYQTNKTTGNTDKRAFVETWQSFYRK |
| | | KLKEVWKPAV (SEQ ID NO: 443) |

### Example 3: CasX Construct 488 and 491

[0561] In order to generate the CasX 488 construct (sequences in Table 6), the codon-optimized CasX 119 construct (based on the CasX Stx2 construct of Example 1, encoding Planctomycetes CasX SEQ ID NO:2, with a A708K substitution, a L379R substitution, and a [P793] deletion with fused NLS, and linked guide and non-targeting sequences) was utilized as the starting construct, and was generated using the methodologies of Example 2. In order to generate CasX 491 (sequences in Table 6), the CasX 484 construct DNA was PCR amplified using Q5 DNA polymerase (New England BioLabs Cat #M0491L) was utilized as the starting construct, and was generated using the methodologies of Example 2 (see FIG. 5). The resultant plasmids were sequenced using Sanger sequencing. Sequences encoding the targeting sequences that target the gene of interest were designed based on CasX PAM locations, as described in Example 2. SaCas9 and SpyCas9 control plasmids were prepared similarly to pStX plasmids described above, with the protein and guide regions of pStX exchanged for the respective protein and guide. Targeting sequences for SaCas9 and SpyCas9 were either obtained from the literature or were rationally designed according to established methods. The expression and recovery of the CasX constructs was performed using the general methodologies of Example 1 and Example 2, with similar results obtained.

TABLE 6
Sequences of CasX 488 and 491

| Construct | DNA Sequence | Amino Acid Sequence |
|---|---|---|
| CasX 488 | (SEQ ID NO: 444) | QEIKRINKIRRRLVKDSNTKKAGKTGPMKTLLVRVMTPDLRERLE |
| | | NLRKKPENIPQPISNTSRANLNKLLTDYTEMKKAILHVYWEEFQK |
| | | DPVGLMSRVAQPASKKIDQNKLKPEMDEKGNLTTAGFACSQCGQP |
| | | LFVYKLEQVSEKGKAYTNYFGRCNVAEHEKLILLAQLKPEKDSDE |
| | | AVTYSLGKFGQRALDFYSIHVTKESTHPVKPLAQIAGNRYASGPV |
| | | GKALSDACMGTIASELSKYQD111EHQKVVKGNQKRLESLRELAG |
| | | KENLEYPSVTLPPQPHTKEGVDAYNEVIARVRMWVNLNLWQKLKL |
| | | SRDDAKPLLRLKGFPSFPLVERQANEVDWWDMVCNVKKLINEKKE |
| | | DGKVFWQNLAGYKRQEALRPYLSSEEDRKKGKKFARYQFGDLLLH |
| | | LEKKHGEDWGKVYDEAWERIDKKVEGLSKHIKLEEERRSEDAQSK |
| | | AALTDWLRAKASFVIEGLKEADKDEFCRCELKLQKWYGDLRGKPF |
| | | AIEAENSILDISGFSKQYNCAFIWQKDGVKKLNLYLIINYFKGGK |
| | | LRFKKIKPEAFEANRFYTVINKKSGEIVPMEVNFNFDDPNLIILP |
| | | LAFGKRQGREFIWNDLLSLETGSLKLANGRVIEKTLYNRRTRQDE |
| | | PALFVALTFERREVLDSSNIKPMNLIGIDRGENIPAVIALTDPEG |
| | | CPLSRFKDSLGNPTHILRIGESYKEKQRTIQAKKEVEQRRAGGYS |
| | | RKYASKAKNLADDMVRNTARDLLYYAVTQDAMLIFENLSRGFGRQ |
| | | GKRTFMAERQYTRMEDWLTAKLAYEGLSKTYLSKTLAQYTSKTCS |
| | | NCGFTITSADYDRVLEKLKKTATGWMTTINGKELKVEGQITYYNR |
| | | YKRQNVVKDLSVELDRLSEESVNNDISSWTKGRSGEALSLLKKRF |
| | | SHRPVQEKFVCLNCGFETHADEQAALNIARSWLFLRSQEYKKYQT |
| | | NKTTGNTDKRAFVETWQSFYRKKLKEVWKPAV |
| | | (SEQ ID NO: 445) |
| CasX 491 | (SEQ ID NO: 446) | QEIKRINKIRRRLVKDSNTKKAGKTGPMKTLLVRVMTPDLRERLE |
| | | NLRKKPENIPQPISNTSRANLNKLLTDYTEMKKAILHVYWEEFQK |
| | | DPVGLMSRVAQPASKKIDQNKLKPEMDEKGNLTTAGFACSQCGQP |
| | | LFVYKLEQVSEKGKAYTNYFGRCNVAEHEKLILLAQLKPEKDSDE |
| | | AVTYSLGKFGQRALDFYSIHVTKESTHPVKPLAQIAGNRYASGPV |
| | | GKALSDACMGTIASELSKYQD111EHQKVVKGNQKRLESLRELAG |
| | | KENLEYPSVTLPPQPHTKEGVDAYNEVIARVRMWVNLNLWQKLKL |
| | | SRDDAKPLLRLKGFPSFPLVERQANEVDWWDMVCNVKKLINEKKE |
| | | DGKVFWQNLAGYKRQEALRPYLSSEEDRKKGKKFARYQLGDLLLH |
| | | LEKKHGEDWGKVYDEAWERIDKKVEGLSKHIKLEEERRSEDAQSK |
| | | AALTDWLRAKASFVIEGLKEADKDEFCRCELKLQKWYGDLRGKPF |
| | | AIEAENSILDISGFSKQYNCAFIWQKDGVKKLNLYLIINYFKGGK |
| | | LRFKKIKPEAFEANRFYTVINKKSGEIVPMEVNFNFDDPNLIILP |
| | | LAFGKRQGREFIWNDLLSLETGSLKLANGRVIEKTLYNRRTRQDE |
| | | PALEVALTEERREVLDSSNIKPMNLIGVDRGENIPAVIALTDPEG |
| | | CPLSRFKDSLGNPTHILRIGESYKEKQRTIQAKKEVEQRRAGGYS |
| | | RKYASKAKNLADDMVRNTARDLLYYAVTQDAMLIFENLSRGFGRQ |
| | | GKRTFMAERQYTRMEDWLTAKLAYEGLSKTYLSKTLAQYTSKTCS |
| | | NCGFTITSADYDRVLEKLKKTATGWMTTINGKELKVEGQITYYNR |
| | | YKRQNVVKDLSVELDRLSEESVNNDISSWTKGRSGEALSLLKKRF |
| | | SHRPVQEKFVCLNCGFETHADEQAALNIARSWLFLRSQEYKKYQT |
| | | NKTTGNTDKRAFVETWQSFYRKKLKEVWKPAV |
| | | (SEQ ID NO: 447) |

### Example 4: Design and Generation of CasX Constructs 278-280, 285-288, 290, 291, 293, 300, 492, and 493

[0562] In order to generate the CasX 278-280, 285-288, 290, 291, 293, 300, 492, and 493 constructs (sequences in Table 7), the N- and C-termini of the codon-optimized CasX 119 construct (based on the CasX Stx37 construct of Example 2) in a mammalian expression vector were manipulated to delete or add NLS sequences (sequences in Table 8). Constructs 278, 279, and 280 were manipulations of the N- and C-termini using only an SV40 NLS sequence. Construct 280 had no NLS on the N-terminus and added two SV40 NLS' on the C-terminus with a triple proline linker in between the two SV40 NLS sequences. In order to generate constructs 492 and 493, constructs 280 and 291 were used as the starting constructs. Cloning methods were performed as described in Example 2. The resultant plasmids were sequenced using Sanger sequencing. Sequences encoding the targeting sequences that target the gene of interest were designed based on CasX PAM locations, and was prepared as described in Example 2. The plasmids were used to produce and recover CasX protein utilizing the general methodologies of Examples 1 and 2. The resultant plasmids were sequenced using Sanger sequencing. Sequences encoding the targeting spacer sequences that target the gene of interest were designed based on CasX PAM locations. The expression and recovery of the CasX constructs was performed using the general methodologies of Example 1 and Example 2, with similar results obtained.

TABLE 7
CasX 278-280, 285-288, 290, 291, 293, 300, 492, and 493 sequences

| Construct | Amino Acid Sequence |
|---|---|
| 278 | MAPKKKRKVSRQEIKRINKIRRRLVKDSNTKKAGKTGPMKTLLVRVMTPDLRERL |
| | ENLRKKPENIPQPISNTSRANLNKLLTDYTEMKKAILHVYWEEFQKDPVGLMSRV |
| | AQPAPKNIDQRKLIPVKDGNERLTSSGFACSQCCQPLYVYKLEQVNDKGKPHTNY |
| | FGRCNVSEHERLILLSPHKPEANDELVTYSLGKFGQRALDFYSIHVTRESNHPVK |
| | PLEQIGGNSCASGPVGKALSDACMGAVASFLTKYQDIILEHQKVIKKNEKRLANL |
| | KDIASANGLAFPKITLPPQPHTKEGIEAYNNVVAQIVIWVNLNLWQKLKIGRDEA |
| | KPLQRLKGFPSFPLVERQANEVDWWDMVCNVKKLINEKKEDGKVFWQNLAGYKRQ |
| | EALRPYLSSEEDRKKGKKFARYQFGDLLLHLEKKHGEDWGKVYDEAWERIDKKVE |
| | GLSKHIKLEEERRSEDAQSKAALTDWLRAKASFVIEGLKEADKDEFCRCELKLQK |
| | WYGDLRGKPFAIEAENSILDISGFSKQYNCAFIWQKDGVKKLNLYLIINYFKGGK |
| | LRFKKIKPEAFEANRFYTVINKKSGEIVPMEVNFNFDDPNLIILPLAFGKRQGRE |
| | FIWNDLLSLETGSLKLANGRVIEKTLYNRRTRQDEPALFVALTFERREVLDSSNI |
| | KPMNLIGIDRGENIPAVIALTDPEGCPLSRFKDSLGNPTHILRIGESYKEKQRTI |
| | QAKKEVEQRRAGGYSRKYASKAKNLADDMVRNTARDLLYYAVTQDAMLIFENLSR |
| | GFGRQGKRTFMAERQYTRMEDWLTAKLAYEGLSKTYLSKTLAQYTSKTCSNCGFT |
| | ITSADYDRVLEKLKKTATGWMTTINGKELKVEGQITYYNRYKRQNVVKDLSVELD |
| | RLSEESVNNDISSWTKGRSGEALSLLKKRFSHRPVQEKFVCLNCGFETHADEQAA |
| | LNIARSWLFLRSQEYKKYQTNKTTGNTDKRAFVETWQSFYRKKLKEVWKPAV |
| | (SEQ ID NO: 448) |
| 279 | MQEIKRINKIRRRLVKDSNTKKAGKTGPMKTLLVRVMTPDLRERLENLRKKPENI |
| | PQPISNTSRANLNKLLTDYTEMKKAILHVYWEEFQKDPVGLMSRVAQPAPKNIDQ |
| | RKLIPVKDGNERLTSSGFACSQCCQPLYVYKLEQVNDKGKPHTNYFGRCNVSEHE |
| | RLILLSPHKPEANDELVTYSLGKFGQRALDFYSIHVTRESNHPVKPLEQIGGNSC |
| | ASGPVGKALSDACMGAVASFLTKYQDIILEHQKVIKKNEKRLANLKDIASANGLA |
| | FPKITLPPQPHTKEGIEAYNNVVAQIVIWVNLNLWQKLKIGRDEAKPLQRLKGFP |
| | SFPLVERQANEVDWWDMVCNVKKLINEKKEDGKVFWQNLAGYKRQEALRPYLSSE |
| | EDRKKGKKFARYQFGDLLLHLEKKHGEDWGKVYDEAWERIDKKVEGLSKHIKLEE |
| | ERRSEDAQSKAALTDWLRAKASFVIEGLKEADKDEFCRCELKLQKWYGDLRGKPF |
| | AIEAENSILDISGFSKQYNCAFIWQKDGVKKLNLYLIINYFKGGKLRFKKIKPEA |
| | FEANRFYTVINKKSGEIVPMEVNFNFDDPNLIILPLAFGKRQGREFIWNDLLSLE |
| | TGSLKLANGRVIEKTLYNRRTRQDEPALFVALTFERREVLDSSNIKPMNLIGIDR |
| | GENIPAVIALTDPEGCPLSRFKDSLGNPTHILRIGESYKEKQRTIQAKKEVEQRR |
| | AGGYSRKYASKAKNLADDMVRNTARDLLYYAVTQDAMLIFENLSRGFGRQGKRTF |
| | MAERQYTRMEDWLTAKLAYEGLSKTYLSKTLAQYTSKTCSNCGFTITSADYDRVL |
| | EKLKKTATGWMTTINGKELKVEGQITYYNRYKRQNVVKDLSVELDRLSEESVNND |
| | ISSWTKGRSGEALSLLKKRFSHRPVQEKFVCLNCGFETHADEQAALNIARSWLFL |
| | RSQEYKKYQTNKTTGNTDKRAFVETWQSFYRKKLKEVWKPAVTSPKKKRKV |
| | (SEQ ID NO: 449) |
| 280 | MQEIKRINKIRRRLVKDSNTKKAGKTGPMKTLLVRVMTPDLRERLENLRKKPENI |
| | PQPISNTSRANLNKLLTDYTEMKKAILHVYWEEFQKDPVGLMSRVAQPAPKNIDQ |
| | RKLIPVKDGNERLTSSGFACSQCCQPLYVYKLEQVNDKGKPHTNYFGRCNVSEHE |
| | RLILLSPHKPEANDELVTYSLGKFGQRALDFYSIHVTRESNHPVKPLEQIGGNSC |
| | ASGPVGKALSDACMGAVASFLTKYQDIILEHQKVIKKNEKRLANLKDIASANGLA |
| | FPKITLPPQPHTKEGIEAYNNVVAQIVIWVNLNLWQKLKIGRDEAKPLQRLKGFP |
| | SFPLVERQANEVDWWDMVCNVKKLINEKKEDGKVFWQNLAGYKRQEALRPYLSSE |
| | EDRKKGKKFARYQFGDLLLHLEKKHGEDWGKVYDEAWERIDKKVEGLSKHIKLEE |
| | ERRSEDAQSKAALTDWLRAKASFVIEGLKEADKDEFCRCELKLQKWYGDLRGKPF |
| | AIEAENSILDISGFSKQYNCAFIWQKDGVKKLNLYLIINYFKGGKLRFKKIKPEA |
| | FEANREYTVINKKSGEIVPMEVNFNFDDPNLIILPLAFGKRQGREFIWNDLLSLE |
| | TGSLKLANGRVIEKTLYNRRTRQDEPALFVALTFERREVLDSSNIKPMNLIGIDR |
| | GENIPAVIALTDPEGCPLSRFKDSLGNPTHILRIGESYKEKQRTIQAKKEVEQRR |
| | AGGYSRKYASKAKNLADDMVRNTARDLLYYAVTQDAMLIFENLSRGFGRQGKRTF |
| | MAERQYTRMEDWLTAKLAYEGLSKTYLSKTLAQYTSKTCSNCGFTITSADYDRVL |
| | EKLKKTATGWMTTINGKELKVEGQITYYNRYKRQNVVKDLSVELDRLSEESVNND |
| | ISSWTKGRSGEALSLLKKRFSHRPVQEKFVCLNCGFETHADEQAALNIARSWLFL |
| | RSQEYKKYQTNKTTGNTDKRAFVETWQSFYRKKLKEVWKPAVTSPKKKRKVPPPP |
| | KKKRKV (SEQ ID NO: 450) |
| 285 | MQEIKRINKIRRRLVKDSNTKKAGKTGPMKTLLVRVMTPDLRERLENLRKKPENI |
| | PQPISNTSRANLNKLLTDYTEMKKAILHVYWEEFQKDPVGLMSRVAQPAPKNIDQ |
| | RKLIPVKDGNERLTSSGFACSQCCQPLYVYKLEQVNDKGKPHTNYFGRCNVSEHE |
| | RLILLSPHKPEANDELVTYSLGKFGQRALDFYSIHVTRESNHPVKPLEQIGGNSC |
| | ASGPVGKALSDACMGAVASFLTKYQDIILEHQKVIKKNEKRLANLKDIASANGLA |
| | FPKITLPPQPHTKEGIEAYNNVVAQIVIWVNLNLWQKLKIGRDEAKPLQRLKGFP |
| | SFPLVERQANEVDWWDMVCNVKKLINEKKEDGKVFWQNLAGYKRQEALRPYLSSE |
| | EDRKKGKKFARYQFGDLLLHLEKKHGEDWGKVYDEAWERIDKKVEGLSKHIKLEE |
| | ERRSEDAQSKAALTDWLRAKASFVIEGLKEADKDEFCRCELKLQKWYGDLRGKPF |
| | AIEAENSILDISGFSKQYNCAFIWQKDGVKKLNLYLIINYFKGGKLRFKKIKPEA |
| | FEANREYTVINKKSGEIVPMEVNFNFDDPNLIILPLAFGKRQGREFIWNDLLSLE |
| | TGSLKLANGRVIEKTLYNRRTRQDEPALFVALTFERREVLDSSNIKPMNLIGIDR |
| | GENIPAVIALTDPEGCPLSRFKDSLGNPTHILRIGESYKEKQRTIQAKKEVEQRR |
| | AGGYSRKYASKAKNLADDMVRNTARDLLYYAVTQDAMLIFENLSRGFGRQGKRTF |
| | MAERQYTRMEDWLTAKLAYEGLSKTYLSKTLAQYTSKTCSNCGFTITSADYDRVL |
| | EKLKKTATGWMTTINGKELKVEGQITYYNRYKRQNVVKDLSVELDRLSEESVNND |
| | ISSWTKGRSGEALSLLKKRFSHRPVQEKFVCLNCGFETHADEQAALNIARSWLFL |
| | RSQEYKKYQTNKTTGNTDKRAFVETWQSFYRKKLKEVWKPAVTSPKKKRKVPPPH |
| | KKKHPDASVNFSEFSK (SEQ ID NO: 451) |
| 286 | MQEIKRINKIRRRLVKDSNTKKAGKTGPMKTLLVRVMTPDLRERLENLRKKPENI |
| | PQPISNTSRANLNKLLTDYTEMKKAILHVYWEEFQKDPVGLMSRVAQPAPKNIDQ |
| | RKLIPVKDGNERLTSSGFACSQCCQPLYVYKLEQVNDKGKPHTNYFGRCNVSEHE |
| | RLILLSPHKPEANDELVTYSLGKFGQRALDFYSIHVTRESNHPVKPLEQIGGNSC |
| | ASGPVGKALSDACMGAVASFLTKYQDIILEHQKVIKKNEKRLANLKDIASANGLA |
| | FPKITLPPQPHTKEGIEAYNNVVAQIVIWVNLNLWQKLKIGRDEAKPLQRLKGFP |
| | SFPLVERQANEVDWWDMVCNVKKLINEKKEDGKVFWQNLAGYKRQEALRPYLSSE |
| | EDRKKGKKFARYQFGDLLLHLEKKHGEDWGKVYDEAWERIDKKVEGLSKHIKLEE |
| | ERRSEDAQSKAALTDWLRAKASFVIEGLKEADKDEFCRCELKLQKWYGDLRGKPF |
| | AIEAENSILDISGFSKQYNCAFIWQKDGVKKLNLYLIINYFKGGKLRFKKIKPEA |
| | FEANRFYTVINKKSGEIVPMEVNFNFDDPNLIILPLAFGKRQGREFIWNDLLSLE |
| | TGSLKLANGRVIEKTLYNRRTRQDEPALFVALTFERREVLDSSNIKPMNLIGIDR |
| | GENIPAVIALTDPEGCPLSRFKDSLGNPTHILRIGESYKEKQRTIQAKKEVEQRR |
| | AGGYSRKYASKAKNLADDMVRNTARDLLYYAVTQDAMLIFENLSRGFGRQGKRTF |
| | MAERQYTRMEDWLTAKLAYEGLSKTYLSKTLAQYTSKTCSNCGFTITSADYDRVL |
| | EKLKKTATGWMTTINGKELKVEGQITYYNRYKRQNVVKDLSVELDRLSEESVNND |
| | ISSWTKGRSGEALSLLKKRFSHRPVQEKFVCLNCGFETHADEQAALNIARSWLFL |
| | RSQEYKKYQTNKTTGNTDKRAFVETWQSFYRKKLKEVWKPAVTSPKKKRKVPPPQ |
| | RPGPYDRPQRPGPYDRP (SEQ ID NO: 452) |
| 287 | MQEIKRINKIRRRLVKDSNTKKAGKTGPMKTLLVRVMTPDLRERLENLRKKPENI |
| | PQPISNTSRANLNKLLTDYTEMKKAILHVYWEEFQKDPVGLMSRVAQPAPKNIDQ |
| | RKLIPVKDGNERLTSSGFACSQCCQPLYVYKLEQVNDKGKPHTNYFGRCNVSEHE |
| | RLILLSPHKPEANDELVTYSLGKFGQRALDFYSIHVTRESNHPVKPLEQIGGNSC |
| | ASGPVGKALSDACMGAVASFLTKYQDIILEHQKVIKKNEKRLANLKDIASANGLA |
| | FPKITLPPQPHTKEGIEAYNNVVAQIVIWVNLNLWQKLKIGRDEAKPLQRLKGFP |
| | SFPLVERQANEVDWWDMVCNVKKLINEKKEDGKVFWQNLAGYKRQEALRPYLSSE |
| | EDRKKGKKFARYQFGDLLLHLEKKHGEDWGKVYDEAWERIDKKVEGLSKHIKLEE |
| | ERRSEDAQSKAALTDWLRAKASFVIEGLKEADKDEFCRCELKLQKWYGDLRGKPF |
| | AIEAENSILDISGFSKQYNCAFIWQKDGVKKLNLYLIINYFKGGKLRFKKIKPEA |
| | FEANRFYTVINKKSGEIVPMEVNFNFDDPNLIILPLAFGKRQGREFIWNDLLSLE |
| | TGSLKLANGRVIEKTLYNRRTRQDEPALFVALTFERREVLDSSNIKPMNLIGIDR |
| | GENIPAVIALTDPEGCPLSRFKDSLGNPTHILRIGESYKEKQRTIQAKKEVEQRR |
| | AGGYSRKYASKAKNLADDMVRNTARDLLYYAVTQDAMLIFENLSRGFGRQGKRTF |
| | MAERQYTRMEDWLTAKLAYEGLSKTYLSKTLAQYTSKTCSNCGFTITSADYDRVL |
| | EKLKKTATGWMTTINGKELKVEGQITYYNRYKRQNVVKDLSVELDRLSEESVNND |
| | ISSWTKGRSGEALSLLKKRFSHRPVQEKFVCLNCGFETHADEQAALNIARSWLFL |
| | RSQEYKKYQTNKTTGNTDKRAFVETWQSFYRKKLKEVWKPAVTSPKKKRKVPPPL |
| | SPSLSPLLSPSLSPL (SEQ ID NO: 453) |
| 288 | MQEIKRINKIRRRLVKDSNTKKAGKTGPMKTLLVRVMTPDLRERLENLRKKPENI |
| | PQPISNTSRANLNKLLTDYTEMKKAILHVYWEEFQKDPVGLMSRVAQPAPKNIDQ |
| | RKLIPVKDGNERLTMSSGFACSQCCQPLYVYKLEQVNDKGKPHTNYFGRCNVSEH |
| | ERLILLSPHKPEANDELVTYSLGKFGQRALDFYSIHVTRESNHPVKPLEQIGGNS |
| | CASGPVGKALSDACMGAVASFLTKYQDIILEHQKVIKKNEKRLANLKDIASANGL |
| | AFPKITLPPQPHTKEGIEAYNNVVAQIVIWVNLNLWQKLKIGRDEAKPLQRLKGF |
| | PSFPLVERQANEVDWWDMVCNVKKLINEKKEDGKVFWQNLAGYKRQEALRPYLSS |
| | EEDRKKGKKFARYQFGDLLLHLEKKHGEDWGKVYDEAWERIDKKVEGLSKHIKLE |
| | EERRSEDAQSKAALTDWLRAKASFVIEGLKEADKDEFCRCELKLQKWYGDLRGKP |
| | FAIEAENSILDISGFSKQYNCAFIWQKDGVKKLNLYLIINYFKGGKLRFKKIKPE |
| | AFEANRFYTVINKKSGEIVPMEVNFNFDDPNLIILPLAFGKRQGREFIWNDLLSL |
| | ETGSLKLANGRVIEKTLYNRRTRQDEPALFVALTFERREVLDSSNIKPMNLIGID |
| | RGENIPAVIALTDPEGCPLSRFKDSLGNPTHILRIGESYKEKQRTIQAKKEVEQR |
| | RAGGYSRKYASKAKNLADDMVRNTARDLLYYAVTQDAMLIFENLSRGFGRQGKRT |
| | FMAERQYTRMEDWLTAKLAYEGLSKTYLSKTLAQYTSKTCSNCGFTITSADYDRV |
| | LEKLKKTATGWMTTINGKELKVEGQITYYNRYKRQNWKDLSVELDRLSEESVNN |
| | DISSWTKGRSGEALSLLKKRFSHRPVQEKFVCLNCGFETHADEQAALNIARSWLF |
| | LRSQEYKKYQTNKTTGNTDKRAFVETWQSFYRKKLKEVWKPAVTSPKKKRKVPPP |
| | RGKGGKGLGKGGAKRHRK (SEQ ID NO: 454) |
| 290 | MQEIKRINKIRRRLVKDSNTKKAGKTGPMKTLLVRVMTPDLRERLENLRKKPENI |
| | PQPISNTSRANLNKLLTDYTEMKKAILHVYWEEFQKDPVGLMSRVAQPAPKNIDQ |
| | RKLIPVKDGNERLTSSGFACSQCCQPLYVYKLEQVNDKGKPHTNYFGRCNVSEHE |
| | RLILLSPHKPEANDELVTYSLGKFGQRALDFYSIHVTRESNHPVKPLEQIGGNSC |
| | ASGPVGKALSDACMGAVASFLTKYQDIILEHQKVIKKNEKRLANLKDIASANGLA |
| | FPKITLPPQPHTKEGIEAYNNVVAQIVIWVNLNLWQKLKIGRDEAKPLQRLKGFP |
| | SFPLVERQANEVDWWDMVCNVKKLINEKKEDGKVFWQNLAGYKRQEALRPYLSSE |
| | EDRKKGKKFARYQFGDLLLHLEKKHGEDWGKVYDEAWERIDKKVEGLSKHIKLEE |
| | ERRSEDAQSKAALTDWLRAKASFVIEGLKEADKDEFCRCELKLQKWYGDLRGKPF |
| | AIEAENSILDISGFSKQYNCAFIWQKDGVKKLNLYLIINYFKGGKLRFKKIKPEA |
| | FEANREYTVINKKSGEIVPMEVNFNFDDPNLIILPLAFGKRQGREFIWNDLLSLE |
| | TGSLKLANGRVIEKTLYNRRTRQDEPALFVALTFERREVLDSSNIKPMNLIGIDR |
| | GENIPAVIALTDPEGCPLSRFKDSLGNPTHILRIGESYKEKQRTIQAKKEVEQRR |
| | AGGYSRKYASKAKNLADDMVRNTARDLLYYAVTQDAMLIFENLSRGFGRQGKRTF |
| | MAERQYTRMEDWLTAKLAYEGLSKTYLSKTLAQYTSKTCSNCGFTITSADYDRVL |
| | EKLKKTATGWMTTINGKELKVEGQITYYNRYKRQNVVKDLSVELDRLSEESVNND |
| | ISSWTKGRSGEALSLLKKRFSHRPVQEKFVCLNCGFETHADEQAALNIARSWLFL |
| | RSQEYKKYQTNKTTGNTDKRAFVETWQSFYRKKLKEVWKPAVTSPKKKRKVPPPS |
| | RRRKANPTKLSENAKKLAKEVEN (SEQ ID NO: 455) |
| 291 | MQEIKRINKIRRRLVKDSNTKKAGKTGPMKTLLVRVMTPDLRERLENLRKKPENI |
| | PQPISNTSRANLNKLLTDYTEMKKAILHVYWEEFQKDPVGLMSRVAQPAPKNIDQ |
| | RKLIPVKDGNERLTSSGFACSQCCQPLYVYKLEQVNDKGKPHTNYFGRCNVSEHE |
| | RLILLSPHKPEANDELVTYSLGKFGQRALDFYSIHVTRESNHPVKPLEQIGGNSC |
| | ASGPVGKALSDACMGAVASFLTKYQDIILEHQKVIKKNEKRLANLKDIASANGLA |
| | FPKITLPPQPHTKEGIEAYNNVVAQIVIWVNLNLWQKLKIGRDEAKPLQRLKGFP |
| | SFPLVERQANEVDWWDMVCNVKKLINEKKEDGKVFWQNLAGYKRQEALRPYLSSE |
| | EDRKKGKKFARYQFGDLLLHLEKKHGEDWGKVYDEAWERIDKKVEGLSKHIKLEE |
| | ERRSEDAQSKAALTDWLRAKASFVIEGLKEADKDEFCRCELKLQKWYGDLRGKPF |
| | AIEAENSILDISGFSKQYNCAFIWQKDGVKKLNLYLIINYFKGGKLRFKKIKPEA |
| | FEANRFYTVINKKSGEIVPMEVNFNFDDPNLIILPLAFGKRQGREFIWNDLLSLE |
| | TGSLKLANGRVIEKTLYNRRTRQDEPALFVALTFERREVLDSSNIKPMNLIGIDR |
| | GENIPAVIALTDPEGCPLSRFKDSLGNPTHILRIGESYKEKQRTIQAKKEVEQRR |
| | AGGYSRKYASKAKNLADDMVRNTARDLLYYAVTQDAMLIFENLSRGFGRQGKRTF |
| | MAERQYTRMEDWLTAKLAYEGLSKTYLSKTLAQYTSKTCSNCGFTITSADYDRVL |
| | EKLKKTATGWMTTINGKELKVEGQITYYNRYKRQNVVKDLSVELDRLSEESVNND |
| | ISSWTKGRSGEALSLLKKRFSHRPVQEKFVCLNCGFETHADEQAALNIARSWLFL |
| | RSQEYKKYQTNKTTGNTDKRAFVETWQSFYRKKLKEVWKPAVTSPKKKRKVPPPP |
| | AAKRVKLD (SEQ ID NO: 456) |
| 293 | MQEIKRINKIRRRLVKDSNTKKAGKTGPMKTLLVRVMTPDLRERLENLRKKPENI |
| | PQPISNTSRANLNKLLTDYTEMKKAILHVYWEEFQKDPVGLMSRVAQPAPKNIDQ |
| | RKLIPVKDGNERLTSSGFACSQCCQPLYVYKLEQVNDKGKPHTNYFGRCNVSEHE |
| | RLILLSPHKPEANDELVTYSLGKFGQRALDFYSIHVTRESNHPVKPLEQIGGNSC |
| | ASGPVGKALSDACMGAVASFLTKYQDIILEHQKVIKKNEKRLANLKDIASANGLA |
| | FPKITLPPQPHTKEGIEAYNNVVAQIVIWVNLNLWQKLKIGRDEAKPLQRLKGFP |
| | SFPLVERQANEVDWWDMVCNVKKLINEKKEDGKVFWQNLAGYKRQEALRPYLSSE |
| | EDRKKGKKFARYQFGDLLLHLEKKHGEDWGKVYDEAWERIDKKVEGLSKHIKLEE |
| | ERRSEDAQSKAALTDWLRAKASFVIEGLKEADKDEFCRCELKLQKWYGDLRGKPF |
| | AIEAENSILDISGFSKQYNCAFIWQKDGVKKLNLYLIINYFKGGKLRFKKIKPEA |
| | FEANREYTVINKKSGEIVPMEVNFNFDDPNLIILPLAFGKRQGREFIWNDLLSLE |
| | TGSLKLANGRVIEKTLYNRRTRQDEPALFVALTFERREVLDSSNIKPMNLIGIDR |
| | GENIPAVIALTDPEGCPLSRFKDSLGNPTHILRIGESYKEKQRTIQAKKEVEQRR |
| | AGGYSRKYASKAKNLADDMVRNTARDLLYYAVTQDAMLIFENLSRGFGRQGKRTF |
| | MAERQYTRMEDWLTAKLAYEGLSKTYLSKTLAQYTSKTCSNCGFTITSADYDRVL |
| | EKLKKTATGWMTTINGKELKVEGQITYYNRYKRQNVVKDLSVELDRLSEESVNND |
| | ISSWTKGRSGEALSLLKKRFSHRPVQEKFVCLNCGFETHADEQAALNIARSWLFL |
| | RSQEYKKYQTNKTTGNTDKRAFVETWQSFYRKKLKEVWKPAVTSPKKKRKVPPPK |
| | RSFSKAF (SEQ ID NO: 457) |
| 300 | MQEIKRINKIRRRLVKDSNTKKAGKTGPMKTLLVRVMTPDLRERLENLRKKPENI |
| | PQPISNTSRANLNKLLTDYTEMKKAILHVYWEEFQKDPVGLMSRVAQPAPKNIDQ |
| | RKLIPVKDGNERLTSSGFACSQCCQPLYVYKLEQVNDKGKPHTNYFGRCNVSEHE |
| | RLILLSPHKPEANDELVTYSLGKFGQRALDFYSIHVTRESNHPVKPLEQIGGNSC |
| | ASGPVGKALSDACMGAVASFLTKYQDIILEHQKVIKKNEKRLANLKDIASANGLA |
| | FPKITLPPQPHTKEGIEAYNNVVAQIVIWVNLNLWQKLKIGRDEAKPLQRLKGFP |
| | SFPLVERQANEVDWWDMVCNVKKLINEKKEDGKVFWQNLAGYKRQEALRPYLSSE |
| | EDRKKGKKFARYQFGDLLLHLEKKHGEDWGKVYDEAWERIDKKVEGLSKHIKLEE |
| | ERRSEDAQSKAALTDWLRAKASFVIEGLKEADKDEFCRCELKLQKWYGDLRGKPF |
| | AIEAENSILDISGFSKQYNCAFIWQKDGVKKLNLYLIINYFKGGKLRFKKIKPEA |
| | FEANRFYTVINKKSGEIVPMEVNFNFDDPNLIILPLAFGKRQGREFIWNDLLSLE |
| | TGSLKLANGRVIEKTLYNRRTRQDEPALFVALTFERREVLDSSNIKPMNLIGIDR |
| | GENIPAVIALTDPEGCPLSRFKDSLGNPTHILRIGESYKEKQRTIQAKKEVEQRR |
| | AGGYSRKYASKAKNLADDMVRNTARDLLYYAVTQDAMLIFENLSRGFGRQGKRTF |
| | MAERQYTRMEDWLTAKLAYEGLSKTYLSKTLAQYTSKTCSNCGFTITSADYDRVL |
| | EKLKKTATGWMTTINGKELKVEGQITYYNRYKRQNVVKDLSVELDRLSEESVNND |
| | ISSWTKGRSGEALSLLKKRFSHRPVQEKFVCLNCGFETHADEQAALNIARSWLFL |
| | RSQEYKKYQTNKTTGNTDKRAFVETWQSFYRKKLKEVWKPAVTSPKKKRKVPPPK |
| | RGINDRNFWRGENERKTR (SEQ ID NO: 458) |
| 492 | MAPKKKRKVSRMQEIKRINKIRRRLVKDSNTKKAGKTGPMKTLLVRVMTPDLRER |
| | LENLRKKPENIPQPISNTSRANLNKLLTDYTEMKKAILHVYWEEFQKDPVGLMSR |
| | VAQPAPKNIDQRKLIPVKDGNERLTSSGFACSQCCQPLYVYKLEQVNDKGKPHTN |
| | YFGRCNVSEHERLILLSPHKPEANDELVTYSLGKFGQRALDFYSIHVTRESNHPV |
| | KPLEQIGGNSCASGPVGKALSDACMGAVASFLTKYQDIILEHQKVIKKNEKRLAN |
| | LKDIASANGLAFPKITLPPQPHTKEGIEAYNNVVAQIVIWVNLNLWQKLKIGRDE |
| | AKPLQRLKGFPSFPLVERQANEVDWWDMVCNVKKLINEKKEDGKVFWQNLAGYKR |
| | QEALRPYLSSEEDRKKGKKFARYQFGDLLLHLEKKHGEDWGKVYDEAWERIDKKV |
| | EGLSKHIKLEEERRSEDAQSKAALTDWLRAKASFVIEGLKEADKDEFCRCELKLQ |
| | KWYGDLRGKPFAIEAENSILDISGFSKQYNCAFIWQKDGVKKLNLYLIINYFKGG |
| | KLRFKKIKPEAFEANRFYTVINKKSGEIVPMEVNFNFDDPNLIILPLAFGKRQGR |
| | EFIWNDLLSLETGSLKLANGRVIEKTLYNRRTRQDEPALFVALTFERREVLDSSN |
| | IKPMNLIGIDRGENIPAVIALTDPEGCPLSRFKDSLGNPTHILRIGESYKEKQRT |
| | IQAKKEVEQRRAGGYSRKYASKAKNLADDMVRNTARDLLYYAVTQDAMLIFENLS |
| | RGFGRQGKRTFMAERQYTRMEDWLTAKLAYEGLSKTYLSKTLAQYTSKTCSNCGF |
| | TITSADYDRVLEKLKKTATGWMTTINGKELKVEGQITYYNRYKRQNVVKDLSVEL |
| | DRLSEESVNNDISSWTKGRSGEALSLLKKRFSHRPVQEKFVCLNCGFETHADEQA |
| | ALNIARSWLFLRSQEYKKYQTNKTTGNTDKRAFVETWQSFYRKKLKEVWKPAVTS |
| | PKKKRKVPPPPKKKRKV (SEQ ID NO: 459) |
| 493 | MAPKKKRKVSRMQEIKRINKIRRRLVKDSNTKKAGKTGPMKTLLVRVMTPDLRER |
| | LENLRKKPENIPQPISNTSRANLNKLLTDYTEMKKAILHVYWEEFQKDPVGLMSR |
| | VAQPAPKNIDQRKLIPVKDGNERLTSSGFACSQCCQPLYVYKLEQVNDKGKPHTN |
| | YFGRCNVSEHERLILLSPHKPEANDELVTYSLGKFGQRALDFYSIHVTRESNHPV |
| | KPLEQIGGNSCASGPVGKALSDACMGAVASFLTKYQDIILEHQKVIKKNEKRLAN |
| | LKDIASANGLAFPKITLPPQPHTKEGIEAYNNVVAQIVIWVNLNLWQKLKIGRDE |
| | AKPLQRLKGFPSFPLVERQANEVDWWDMVCNVKKLINEKKEDGKVFWQNLAGYKR |
| | QEALRPYLSSEEDRKKGKKFARYQFGDLLLHLEKKHGEDWGKVYDEAWERIDKKV |
| | EGLSKHIKLEEERRSEDAQSKAALTDWLRAKASFVIEGLKEADKDEFCRCELKLQ |
| | KWYGDLRGKPFAIEAENSILDISGFSKQYNCAFIWQKDGVKKLNLYLIINYFKGG |
| | KLRFKKIKPEAFEANRFYTVINKKSGEIVPMEVNFNFDDPNLIILPLAFGKRQGR |
| | EFIWNDLLSLETGSLKLANGRVIEKTLYNRRTRQDEPALFVALTFERREVLDSSN |
| | IKPMNLIGIDRGENIPAVIALTDPEGCPLSRFKDSLGNPTHILRIGESYKEKQRT |
| | IQAKKEVEQRRAGGYSRKYASKAKNLADDMVRNTARDLLYYAVTQDAMLIFENLS |
| | RGFGRQGKRTFMAERQYTRMEDWLTAKLAYEGLSKTYLSKTLAQYTSKTCSNCGF |
| | TITSADYDRVLEKLKKTATGWMTTINGKELKVEGQITYYNRYKRQNVVKDLSVEL |
| | DRLSEESVNNDISSWTKGRSGEALSLLKKRFSHRPVQEKFVCLNCGFETHADEQA |
| | ALNIARSWLFLRSQEYKKYQTNKTTGNTDKRAFVETWQSFYRKKLKEVWKPAVTS |
| | PKKKRKVPPPPAAKRVKLD (SEQ ID NO: 460) |

TABLE 8
Nuclear localization sequence list

| CasX | NLS | DNA Sequence | Amino Acid Sequence |
|---|---|---|---|
| 278, 279, | SV40 | CCAAAGAAGAAGCGGAAGGTC | PKKKRKV (SEQ ID |
| 280, 492, | | (SEQ ID NO: 461) | NO: 217) |
| 493 | | | |
| 285 | SynthNLS3 | CACAAGAAGAAACATCCAGACGC | HKKKHPDASVNFSEF |
| | | ATCAGTCAACTTTAGCGAGTTCA | SK (SEQ ID NO: |
| | | GTAAA (SEQ ID NO: 462) | 189) |
| 286 | SynthNLS4 | CAGCGCCCTGGGCCTTACGATAG | QRPGPYDRPQRPGPY |
| | | GCCGCAAAGACCCGGACCGTATG | DRP (SEQ ID NO: |
| | | ATCGCCCT (SEQ ID NO: | 190) |
| | | 463) | |
| 287 | SynthNLS5 | CTCAGCCCGAGTCTTAGTCCACT | LSPSLSPLLSPSLSP |
| | | GCTTTCCCCGTCCCTGTCTCCAC | L (SEQ ID NO: |
| | | TG (SEQ ID NO: 464) | 191) |
| 288 | SynthNLS6 | CGGGGCAAGGGTGGCAAGGGGCT | RGKGGKGLGKGGAKR |
| | | TGGCAAGGGGGGGGCAAAGAGGC | HRK (SEQ ID NO: |
| | | ACAGGAAG (SEQ ID NO: | 192) |
| | | 465) | |
| 290 | EGL-13 | AGCCGCCGCAGAAAAGCCAATCC | SRRRKANPTKLSENA |
| | | TACAAAACTGTCAGAAAATGCGA | KKLAKEVEN (SEQ |
| | | AAAAACTTGCTAAGGAGGTGGAA | ID NO: 470) |
| | | AAC (SEQ ID NO: 466) | |
| 291 | c-Myc | CCTGCCGCAAAGCGAGTGAAATT | PAAKRVKLD (SEQ |
| | | GGAC (SEQ ID NO: 467) | ID NO: 224) |
| 293 | Nucleolar RNA | AAGCGGTCCTTCAGTAAGGCCTT | KRSFSKAE (SEQ |
| | Helicase II | T (SEQ ID NO: 468) | ID NO: 181) |
| 300 | Influenza A | AAACGGGGAATAAACGACCGGAA | KRGINDRNFWRGENE |
| | protein | CTTCTGGCGCGGGGAAAACGAGC | RKTR (SEQ ID |
| | | GCAAAACCCGA (SEQ ID NO: | NO: 179) |
| | | 469) | |

### Example 5: Design and Generation of CasX Constructs 387, 395, 485-491, and 494

[0563] In order to generate CasX 395, CasX 485, CasX 486, CasX 487, the codon optimized CasX 119 (based on the CasX 37 construct of Example 2) was used as the starting construct. CasX 435, CasX 438, and CasX 484 were similarly based on the CasX 119 construct of Example 2, with Gibson primers designed to amplify the CasX SEQ ID NO: 1 Helical I domain from amino acid 192-331 in its own vector to replace this corresponding region (aa 193-332) on CasX 119, CasX 435, CasX 438, and CasX 484 in pStx1 respectively. In order to generate CasX 488, CasX 489, CasX 490, CasX 435, CasX 438, and CasX 484 and CasX 491 (sequences in Table 9), the codon optimized CasX 119 (based on the CasX 37 construct of Example 2), were cloned respectively into a 4 kb staging and Gibson primers were designed to amplify the CasX Stx1 NTSB domain from amino acid 101-191 and Helical I domain from amino acid 192-331 in its own vector to replace this similar region (aa 103-332) on CasX 119, CasX 435, CasX 438, and CasX 484 in pStx1 respectively. The plasmids were used to produce and recover CasX protein utilizing the general methodologies of Examples 1 and 2. The resultant plasmids were sequenced using Sanger sequencing. Sequences encoding the targeting spacer sequences that target the gene of interest were designed based on CasX PAM locations. The expression and recovery of the CasX constructs was performed using the general methodologies of Example 1 and Example 2, with similar results obtained.

TABLE 9
Sequences of CasX 395 and 485-491

| | DNA | |
|---|---|---|
| Construct | Sequence | Amino Acid Sequence |
| CasX 387 | (SEQ | MAPKKKRKVSRQEIKRINKIRRRLVKDSNTKKAGKTGPMKTLLVRV |
| | ID NO: | MTPDLRERLENLRKKPENIPQPISNTSRANLNKLLTDYTEMKKAIL |
| | 471) | HVYWEEFQKDPVGLMSRVAQPASKKIDQNKLKPEMDEKGNLTTAGF |
| | | ACSQCGQPLFVYKLEQVSEKGKAYTNYFGRCNVAEHEKLILLAQLK |
| | | PEKDSDEAVTYSLGKFGQRALDFYSIHVTRESNHPVKPLEQIGGNS |
| | | CASGPVGKALSDACMGAVASFLTKYQDIILEHQKVIKKNEKRLANL |
| | | KDIASANGLAFPKITLPPQPHTKEGIEAYNNVVAQIVIWVNLNLWQ |
| | | KLKIGRDEAKPLQRLKGFPSFPLVERQANEVDWWDMVCNVKKLINE |
| | | KKEDGKVFWQNLAGYKRQEALRPYLSSEEDRKKGKKFARYQFGDLL |
| | | LHLEKKHGEDWGKVYDEAWERIDKKVEGLSKHIKLEEERRSEDAQS |
| | | KAALTDWLRAKASFVIEGLKEADKDEFCRCELKLQKWYGDLRGKPF |
| | | AIEAENSILDISGFSKQYNCAFIWQKDGVKKLNLYLIINYFKGGKL |
| | | RFKKIKPEAFEANRFYTVINKKSGEIVPMEVNFNFDDPNLIILPLA |
| | | FGKRQGREFIWNDLLSLETGSLKLANGRVIEKTLYNRRTRQDEPAL |
| | | FVALTFERREVLDSSNIKPMNLIGIDRGENIPAVIALTDPEGCPLS |
| | | RFKDSLGNPTHILRIGESYKEKQRTIQAKKEVEQRRAGGYSRKYAS |
| | | KAKNLADDMVRNTARDLLYYAVTQDAMLIFENLSRGFGRQGKRTFM |
| | | AERQYTRMEDWLTAKLAYEGLSKTYLSKTLAQYTSKTCSNCGFTIT |
| | | SADYDRVLEKLKKTATGWMTTINGKELKVEGQITYYNRYKRQNVVK |
| | | DLSVELDRLSEESVNNDISSWTKGRSGEALSLLKKRFSHRPVQEKF |
| | | VCLNCGFETHADEQAALNIARSWLFLRSQEYKKYQTNKTTGNTDKR |
| | | AFVETWQSFYRKKLKEVWKPAVTSPKKKRKV (SEQ ID NO: |
| | | 472) |
| CasX 395 | (SEQ ID | MAPKKKRKVSRQEIKRINKIRRRLVKDSNTKKAGKTGPMKTLLVRV |
| | NO: | MTPDLRERLENLRKKPENIPQPISNTSRANLNKLLTDYTEMKKAIL |
| | 473) | HVYWEEFQKDPVGLMSRVAQPAPKNIDQRKLIPVKDGNERLTSSGF |
| | | ACSQCCQPLYVYKLEQVNDKGKPHTNYFGRCNVSEHERLILLSPHK |
| | | PEANDELVTYSLGKFGQRALDFYSIHVTKESTHPVKPLAQIAGNRY |
| | | ASGPVGKALSDACMGTIASFLSKYQDIIIEHQKVVKGNQKRLESLR |
| | | ELAGKENLEYPSVTLPPQPHTKEGVDAYNEVIARVRMWVNLNLWQK |
| | | LKLSRDDAKPLLRLKGFPSFPLVERQANEVDWWDMVCNVKKLINEK |
| | | KEDGKVFWQNLAGYKRQEALRPYLSSEEDRKKGKKFARYQFGDLLL |
| | | HLEKKHGEDWGKVYDEAWERIDKKVEGLSKHIKLEEERRSEDAQSK |
| | | AALTDWLRAKASFVIEGLKEADKDEFCRCELKLQKWYGDLRGKPFA |
| | | IEAENSILDISGFSKQYNCAFIWQKDGVKKLNLYLIINYFKGGKLR |
| | | FKKIKPEAFEANRFYTVINKKSGEIVPMEVNFNFDDPNLIILPLAF |
| | | GKRQGREFIWNDLLSLETGSLKLANGRVIEKTLYNRRTRQDEPALF |
| | | VALTFERREVLDSSNIKPMNLIGIDRGENIPAVIALTDPEGCPLSR |
| | | FKDSLGNPTHILRIGESYKEKQRTIQAKKEVEQRRAGGYSRKYASK |
| | | AKNLADDMVRNTARDLLYYAVTQDAMLIFENLSRGFGRQGKRTFMA |
| | | ERQYTRMEDWLTAKLAYEGLSKTYLSKTLAQYTSKTCSNCGFTITS |
| | | ADYDRVLEKLKKTATGWMTTINGKELKVEGQITYYNRYKRQNVVKD |
| | | LSVELDRLSEESVNNDISSWTKGRSGEALSLLKKRFSHRPVQEKFV |
| | | CLNCGFETHADEQAALNIARSWLFLRSQEYKKYQTNKTTGNTDKRA |
| | | FVETWQSFYRKKLKEVWKPAVTSPKKKRKVTSPKKKRKV (SEQ |
| | | ID NO: 474) |
| CasX 485 | (SEQ | MAPKKKRKVSRQEIKRINKIRRRLVKDSNTKKAGKTGPMKTLLVRV |
| | ID NO: | MTPDLRERLENLRKKPENIPQPISNTSRANLNKLLTDYTEMKKAIL |
| | 475) | HVYWEEFQKDPVGLMSRVAQPAPKNIDQRKLIPVKDGNERLTSSGF |
| | | ACSQCCQPLYVYKLEQVNDKGKPHTNYFGRCNVSEHERLILLSPHK |
| | | PEANDELVTYSLGKFGQRALDFYSIHVTKESTHPVKPLAQIAGNRY |
| | | ASGPVGKALSDACMGTIASFLSKYQDIIIEHQKVVKGNQKRLESLR |
| | | ELAGKENLEYPSVTLPPQPHTKEGVDAYNEVIARVRMWVNLNLWQK |
| | | LKLSRDDAKPLLRLKGFPSFPLVERQANEVDWWDMVCNVKKLINEK |
| | | KEDGKVFWQNLAGYKRQEALRPYLSSEEDRKKGKKFARYQLGDLLL |
| | | HLEKKHGEDWGKVYDEAWERIDKKVEGLSKHIKLEEERRSEDAQSK |
| | | AALTDWLRAKASFVIEGLKEADKDEFCRCELKLQKWYGDLRGKPFA |
| | | IEAENSILDISGFSKQYNCAFIWQKDGVKKLNLYLIINYFKGGKLR |
| | | FKKIKPEAFEANRFYTVINKKSGEIVPMEVNFNFDDPNLIILPLAF |
| | | GKRQGREFIWNDLLSLETGSLKLANGRVIEKTLYNRRTRQDEPALF |
| | | VALTFERREVLDSSNIKPMNLIGVDRGENIPAVIALTDPEGCPLSR |
| | | FKDSLGNPTHILRIGESYKEKQRTIQAKKEVEQRRAGGYSRKYASK |
| | | AKNLADDMVRNTARDLLYYAVTQDAMLIFENLSRGFGRQGKRTFMA |
| | | ERQYTRMEDWLTAKLAYEGLSKTYLSKTLAQYTSKTCSNCGFTITS |
| | | ADYDRVLEKLKKTATGWMTTINGKELKVEGQITYYNRRKRQNVVKD |
| | | LSVELDRLSEESVNNDISSWTKGRSGEALSLLKKRFSHRPVQEKFV |
| | | CLNCGFETHADEQAALNIARSWLFLRSQEYKKYQTNKTTGNTDKRA |
| | | FVETWQSFYRKKLKEVWKPAVTSPKKKRKV (SEQ ID NO: |
| | | 476) |
| CasX 486 | (SEQ ID | MAPKKKRKVSRQEIKRINKIRRRLVKDSNTKKAGKTGPMKTLLVRV |
| | NO: | MTPDLRERLENLRKKPENIPQPISNTSRANLNKLLTDYTEMKKAIL |
| | 477) | HVYWEEFQKDPVGLMSRVAQPAPKNIDQRKLIPVKDGNERLTSSGF |
| | | ACSQCCQPLYVYKLEQVNDKGKPHTNYFGRCNVSEHERLILLSPHK |
| | | PEANDELVTYSLGKFGQRALDFYSIHVTKESTHPVKPLAQIAGNRY |
| | | ASGPVGKALSDACMGTIASFLSKYQDIIIEHQKVVKGNQKRLESLR |
| | | ELAGKENLEYPSVTLPPQPHTKEGVDAYNEVIARVRMWVNLNLWQK |
| | | LKLSRDDAKPLLRLKGFPSFPLVERQANEVDWWDMVCNVKKLINEK |
| | | KEDGKVFWQNLAGYKRQEALRPYLSSEEDRKKGKKFARYQLGDLLK |
| | | HLEKKHGEDWGKVYDEAWERIDKKVEGLSKHIKLEEERRSEDAQSK |
| | | AALTDWLRAKASFVIEGLKEADKDEFCRCELKLQKWYGDLRGKPFA |
| | | IEAENSILDISGFSKQYNCAFIWQKDGVKKLNLYLIINYFKGGKLR |
| | | FKKIKPEAFEANRFYTVINKKSGEIVPMEVNFNFDDPNLIILPLAF |
| | | GKRQGREFIWNDLLSLETGSLKLANGRVIEKTLYNRRTRQDEPALF |
| | | VALTFERREVLDSSNIKPMNLIGVDRGENIPAVIALTDPEGCPLSR |
| | | FKDSLGNPTHILRIGESYKEKQRTIQAKKEVEQRRAGGYSRKYASK |
| | | AKNLADDMVRNTARDLLYYAVTQDAMLIFENLSRGFGRQGKRTFMA |
| | | ERQYTRMEDWLTAKLAYEGLSKTYLSKTLAQYTSKTCSNCGFTITS |
| | | ADYDRVLEKLKKTATGWMTTINGKELKVEGQITYYNRRKRQNVVKD |
| | | LSVELDRLSEESVNNDISSWTKGRSGEALSLLKKRFSHRPVQEKFV |
| | | CLNCGFETHADEQAALNIARSWLFLRSQEYKKYQTNKTTGNTDKRA |
| | | FVETWQSFYRKKLKEVWKPAVTSPKKKRKV (SEQ ID NO: |
| | | 478) |
| CasX 487 | (SEQ | MAPKKKRKVSRQEIKRINKIRRRLVKDSNTKKAGKTGPMKTLLVRV |
| | ID NO: | MTPDLRERLENLRKKPENIPQPISNTSRANLNKLLTDYTEMKKAIL |
| | 479) | HVYWEEFQKDPVGLMSRVAQPAPKNIDQRKLIPVKDGNERLTSSGF |
| | | ACSQCCQPLYVYKLEQVNDKGKPHTNYFGRCNVSEHERLILLSPHK |
| | | PEANDELVTYSLGKFGQRALDFYSIHVTKESTHPVKPLAQIAGNRY |
| | | ASGPVGKALSDACMGTIASFLSKYQDIIIEHQKVVKGNQKRLESLR |
| | | ELAGKENLEYPSVTLPPQPHTKEGVDAYNEVIARVRMWVNLNLWQK |
| | | LKLSRDDAKPLLRLKGFPSFPLVERQANEVDWWDMVCNVKKLINEK |
| | | KEDGKVFWQNLAGYKRQEALRPYLSSEEDRKKGKKFARYQLGDLLL |
| | | HLEKKHGEDWGKVYDEAWERIDKKVEGLSKHIKLEEERRSEDAQSK |
| | | AALTDWLRAKASFVIEGLKEADKDEFCRCELKLQKWYGDLRGKPFA |
| | | IEAENSILDISGFSKQYNCAFIWQKDGVKKLNLYLIINYFKGGKLR |
| | | FKKIKPEAFEANRFYTVINKKSGEIVPMEVNFNFDDPNLIILPLAF |
| | | GKRQGREFIWNDLLSLETGSLKLANGRVIEKTLYNRRTRQDEPALF |
| | | VALTFERREVLDSSNIKPMNLIGVDRGENIPAVIALTDPEGCPLSR |
| | | FKDSLGNPTHILRIGESYKEKQRTIQAKKEVEQRRAGGYSRKYASK |
| | | AKNLADDMVRNTARDLLYYAVTQDAMLIFENLSRGFGRQGKRTFMA |
| | | ERQYTRMEDWLTAKLAYEGLSKTYLSKTLAQYTSKTCSNCGFTITS |
| | | ADYDRVLEKLKKTATGWMTTINGKELKVEGQITYYNRYKRQNVVKD |
| | | LSVELDRLSEESVNNDISSWTKGRSGEALSLLKKRFSHRPVQEKFV |
| | | CLNCGFETHADEQAALNIARSWLFLRSQEYKKYQTNKTTGNTDKRA |
| | | FVETWQSFYRKKLKEVWKPAVTSPKKKRKV (SEQ ID NO: |
| | | 480) |
| CasX 488 | (SEQ ID | MAPKKKRKVSRQEIKRINKIRRRLVKDSNTKKAGKTGPMKTLLVRV |
| | NO: | MTPDLRERLENLRKKPENIPQPISNTSRANLNKLLTDYTEMKKAIL |
| | 481) | HVYWEEFQKDPVGLMSRVAQPASKKIDQNKLKPEMDEKGNLTTAGF |
| | | ACSQCGQPLFVYKLEQVSEKGKAYTNYFGRCNVAEHEKLILLAQLK |
| | | PEKDSDEAVTYSLGKFGQRALDFYSIHVTKESTHPVKPLAQIAGNR |
| | | YASGPVGKALSDACMGTIASFLSKYQDIIIEHQKVVKGNQKRLESL |
| | | RELAGKENLEYPSVTLPPQPHTKEGVDAYNEVIARVRMWVNLNLWQ |
| | | KLKLSRDDAKPLLRLKGFPSFPLVERQANEVDWWDMVCNVKKLINE |
| | | KKEDGKVFWQNLAGYKRQEALRPYLSSEEDRKKGKKFARYQFGDLL |
| | | LHLEKKHGEDWGKVYDEAWERIDKKVEGLSKHIKLEEERRSEDAQS |
| | | KAALTDWLRAKASFVIEGLKEADKDEFCRCELKLQKWYGDLRGKPF |
| | | AIEAENSILDISGFSKQYNCAFIWQKDGVKKLNLYLIINYFKGGKL |
| | | RFKKIKPEAFEANRFYTVINKKSGEIVPMEVNFNFDDPNLIILPLA |
| | | FGKRQGREFIWNDLLSLETGSLKLANGRVIEKTLYNRRTRQDEPAL |
| | | FVALTFERREVLDSSNIKPMNLIGIDRGENIPAVIALTDPEGCPLS |
| | | RFKDSLGNPTHILRIGESYKEKQRTIQAKKEVEQRRAGGYSRKYAS |
| | | KAKNLADDMVRNTARDLLYYAVTQDAMLIFENLSRGFGRQGKRTFM |
| | | AERQYTRMEDWLTAKLAYEGLSKTYLSKTLAQYTSKTCSNCGFTIT |
| | | SADYDRVLEKLKKTATGWMTTINGKELKVEGQITYYNRYKRQNVVK |
| | | DLSVELDRLSEESVNNDISSWTKGRSGEALSLLKKRFSHRPVQEKF |
| | | VCLNCGFETHADEQAALNIARSWLFLRSQEYKKYQTNKTTGNTDKR |
| | | AFVETWQSFYRKKLKEVWKPAVTSPKKKRKV (SEQ ID NO: |
| | | 482) |
| CasX 489 | (SEQ ID | MAPKKKRKVSRQEIKRINKIRRRLVKDSNTKKAGKTGPMKTLLVRV |
| | NO: | MTPDLRERLENLRKKPENIPQPISNTSRANLNKLLTDYTEMKKAIL |
| | 483) | HVYWEEFQKDPVGLMSRVAQPASKKIDQNKLKPEMDEKGNLTTAGF |
| | | ACSQCGQPLFVYKLEQVSEKGKAYTNYFGRCNVAEHEKLILLAQLK |
| | | PEKDSDEAVTYSLGKFGQRALDFYSIHVTKESTHPVKPLAQIAGNR |
| | | YASGPVGKALSDACMGTIASFLSKYQDIIIEHQKVVKGNQKRLESL |
| | | RELAGKENLEYPSVTLPPQPHTKEGVDAYNEVIARVRMWVNLNLWQ |
| | | KLKLSRDDAKPLLRLKGFPSFPLVERQANEVDWWDMVCNVKKLINE |
| | | KKEDGKVFWQNLAGYKRQEALRPYLSSEEDRKKGKKFARYQLGDLL |
| | | LHLEKKHGEDWGKVYDEAWERIDKKVEGLSKHIKLEEERRSEDAQS |
| | | KAALTDWLRAKASFVIEGLKEADKDEFCRCELKLQKWYGDLRGKPF |
| | | AIEAENSILDISGFSKQYNCAFIWQKDGVKKLNLYLIINYFKGGKL |
| | | RFKKIKPEAFEANRFYTVINKKSGEIVPMEVNFNFDDPNLIILPLA |
| | | FGKRQGREFIWNDLLSLETGSLKLANGRVIEKTLYNRRTRQDEPAL |
| | | FVALTFERREVLDSSNIKPMNLIGVDRGENIPAVIALTDPEGCPLS |
| | | RFKDSLGNPTHILRIGESYKEKQRTIQAKKEVEQRRAGGYSRKYAS |
| | | KAKNLADDMVRNTARDLLYYAVTQDAMLIFENLSRGFGRQGKRTFM |
| | | AERQYTRMEDWLTAKLAYEGLSKTYLSKTLAQYTSKTCSNCGFTIT |
| | | SADYDRVLEKLKKTATGWMTTINGKELKVEGQITYYNRRKRQNVVK |
| | | DLSVELDRLSEESVNNDISSWTKGRSGEALSLLKKRFSHRPVQEKF |
| | | VCLNCGFETHADEQAALNIARSWLFLRSQEYKKYQTNKTTGNTDKR |
| | | AFVETWQSFYRKKLKEVWKPAVTSPKKKRKV (SEQ ID NO: |
| | | 484) |
| CasX 490 | (SEQ ID | MAPKKKRKVSRQEIKRINKIRRRLVKDSNTKKAGKTGPMKTLLVRV |
| | NO: | MTPDLRERLENLRKKPENIPQPISNTSRANLNKLLTDYTEMKKAIL |
| | 485) | HVYWEEFQKDPVGLMSRVAQPASKKIDQNKLKPEMDEKGNLTTAGF |
| | | ACSQCGQPLFVYKLEQVSEKGKAYTNYFGRCNVAEHEKLILLAQLK |
| | | PEKDSDEAVTYSLGKFGQRALDFYSIHVTKESTHPVKPLAQIAGNR |
| | | YASGPVGKALSDACMGTIASFLSKYQDIIIEHQKVVKGNQKRLESL |
| | | RELAGKENLEYPSVTLPPQPHTKEGVDAYNEVIARVRMWVNLNLWQ |
| | | KLKLSRDDAKPLLRLKGFPSFPLVERQANEVDWWDMVCNVKKLINE |
| | | KKEDGKVFWQNLAGYKRQEALRPYLSSEEDRKKGKKFARYQLGDLL |
| | | KHLEKKHGEDWGKVYDEAWERIDKKVEGLSKHIKLEEERRSEDAQS |
| | | KAALTDWLRAKASFVIEGLKEADKDEFCRCELKLQKWYGDLRGKPF |
| | | AIEAENSILDISGFSKQYNCAFIWQKDGVKKLNLYLIINYFKGGKL |
| | | RFKKIKPEAFEANRFYTVINKKSGEIVPMEVNFNFDDPNLIILPLA |
| | | FGKRQGREFIWNDLLSLETGSLKLANGRVIEKTLYNRRTRQDEPAL |
| | | FVALTFERREVLDSSNIKPMNLIGVDRGENIPAVIALTDPEGCPLS |
| | | RFKDSLGNPTHILRIGESYKEKQRTIQAKKEVEQRRAGGYSRKYAS |
| | | KAKNLADDMVRNTARDLLYYAVTQDAMLIFENLSRGFGRQGKRTFM |
| | | AERQYTRMEDWLTAKLAYEGLSKTYLSKTLAQYTSKTCSNCGFTIT |
| | | SADYDRVLEKLKKTATGWMTTINGKELKVEGQITYYNRRKRQNVVK |
| | | DLSVELDRLSEESVNNDISSWTKGRSGEALSLLKKRFSHRPVQEKF |
| | | VCLNCGFETHADEQAALNIARSWLFLRSQEYKKYQTNKTTGNTDKR |
| | | AFVETWQSFYRKKLKEVWKPAVTSPKKKRKV (SEQ ID NO: |
| | | 486) |
| CasX 491 | (SEQ ID | MAPKKKRKVSRQEIKRINKIRRRLVKDSNTKKAGKTGPMKTLLVRV |
| | NO: | MTPDLRERLENLRKKPENIPQPISNTSRANLNKLLTDYTEMKKAIL |
| | 487) | HVYWEEFQKDPVGLMSRVAQPASKKIDQNKLKPEMDEKGNLTTAGF |
| | | ACSQCGQPLFVYKLEQVSEKGKAYTNYFGRCNVAEHEKLILLAQLK |
| | | PEKDSDEAVTYSLGKFGQRALDFYSIHVTKESTHPVKPLAQIAGNR |
| | | YASGPVGKALSDACMGTIASFLSKYQDIIIEHQKVVKGNQKRLESL |
| | | RELAGKENLEYPSVTLPPQPHTKEGVDAYNEVIARVRMWVNLNLWQ |
| | | KLKLSRDDAKPLLRLKGFPSFPLVERQANEVDWWDMVCNVKKLINE |
| | | KKEDGKVFWQNLAGYKRQEALRPYLSSEEDRKKGKKFARYQLGDLL |
| | | LHLEKKHGEDWGKVYDEAWERIDKKVEGLSKHIKLEEERRSEDAQS |
| | | KAALTDWLRAKASFVIEGLKEADKDEFCRCELKLQKWYGDLRGKPF |
| | | AIEAENSILDISGFSKQYNCAFIWQKDGVKKLNLYLIINYFKGGKL |
| | | RFKKIKPEAFEANRFYTVINKKSGEIVPMEVNFNFDDPNLIILPLA |
| | | FGKRQGREFIWNDLLSLETGSLKLANGRVIEKTLYNRRTRQDEPAL |
| | | FVALTFERREVLDSSNIKPMNLIGVDRGENIPAVIALTDPEGCPLS |
| | | RFKDSLGNPTHILRIGESYKEKQRTIQAKKEVEQRRAGGYSRKYAS |
| | | KAKNLADDMVRNTARDLLYYAVTQDAMLIFENLSRGFGRQGKRTFM |
| | | AERQYTRMEDWLTAKLAYEGLSKTYLSKTLAQYTSKTCSNCGFTIT |
| | | SADYDRVLEKLKKTATGWMTTINGKELKVEGQITYYNRYKRQNVVK |
| | | DLSVELDRLSEESVNNDISSWTKGRSGEALSLLKKRFSHRPVQEKF |
| | | VCLNCGFETHADEQAALNIARSWLFLRSQEYKKYQTNKTTGNTDKR |
| | | AFVETWQSFYRKKLKEVWKPAVTSPKKKRKV (SEQ ID NO: |
| | | 488) |
| CasX 494 | (SEQ | MAPKKKRKVSRQEIKRINKIRRRLVKDSNTKKAGKTGPMKTLLVRV |
| | ID NO: | MTPDLRERLENLRKKPENIPQPISNTSRANLNKLLTDYTEMKKAIL |
| | 489) | HVYWEEFQKDPVGLMSRVAQPASKKIDQNKLKPEMDEKGNLTTAGF |
| | | ACSQCGQPLFVYKLEQVSEKGKAYTNYFGRCNVAEHEKLILLAQLK |
| | | PEKDSDEAVTYSLGKFGQRALDFYSIHVTRESNHPVKPLEQIGGNS |
| | | CASGPVGKALSDACMGAVASFLTKYQDIILEHQKVIKKNEKRLANL |
| | | KDIASANGLAFPKITLPPQPHTKEGIEAYNNVVAQIVIWVNLNLWO |
| | | KLKIGRDEAKPLQRLKGFPSFPLVERQANEVDWWDMVCNVKKLINE |
| | | KKEDGKVFWQNLAGYKRQEALRPYLSSEEDRKKGKKFARYQLGDLL |
| | | LHLEKKHGEDWGKVYDEAWERIDKKVEGLSKHIKLEEERRSEDAQS |
| | | KAALTDWLRAKASFVIEGLKEADKDEFCRCELKLQKWYGDLRGKPF |
| | | AIEAENSILDISGFSKQYNCAFIWQKDGVKKLNLYLIINYFKGGKL |
| | | RFKKIKPEAFEANRFYTVINKKSGEIVPMEVNFNFDDPNLIILPLA |
| | | FGKRQGREFIWNDLLSLETGSLKLANGRVIEKTLYNRRTRQDEPAL |
| | | FVALTFERREVLDSSNIKPMNLIGVDRGENIPAVIALTDPEGCPLS |
| | | RFKDSLGNPTHILRIGESYKEKQRTIQAKKEVEQRRAGGYSRKYAS |
| | | KAKNLADDMVRNTARDLLYYAVTQDAMLIFENLSRGFGRQGKRTFM |
| | | AERQYTRMEDWLTAKLAYEGLSKTYLSKTLAQYTSKTCSNCGFTIT |
| | | SADYDRVLEKLKKTATGWMTTINGKELKVEGQITYYNRYKRQNVVK |
| | | DLSVELDRLSEESVNNDISSWTKGRSGEALSLLKKRFSHRPVQEKF |
| | | VCLNCGFETHADEQAALNIARSWLFLRSQEYKKYQTNKTTGNTDKR |
| | | AFVETWQSFYRKKLKEVWKPAVTSPKKKRKV (SEQ ID NO: |
| | | 490) |

### Example 6: Generation of RNA Guides

[0564] For the generation of RNA single guides and spacers, templates for in vitro transcription were generated by performing PCR with Q5 polymerase (NEB M0491) according to the recommended protocol, with template oligos for each backbone and amplification primers with the T7 promoter and the spacer sequence. The DNA primer sequences for the T7 promoter, guide and spacer for guides and spacers are presented in Table 10, below. The template oligos, labeled “backbone fwd” and “backbone rev” for each scaffold, were included at a final concentration of 20 nM each, and the amplification primers (T7 promoter and the unique spacer primer) were included at a final concentration of 1 uM each. The sg2, sg32, sg64, and sg174 guides correspond to SEQ ID NOS: 5, 2104, 2106, and 2238, respectively, with the exception that sg2, sg32, and sg64 were modified with an additional 5′ G to increase transcription efficiency (compare sequences in Table 10 to Table 2). The 7.37 spacer targets beta2-microglobulin (B2M). Following PCR amplification, templates were cleaned and isolated by phenol-chloroform-isoamyl alcohol extraction followed by ethanol precipitation.

[0565] In vitro transcriptions were carried out in buffer containing 50 mM Tris pH 8.0, 30 mM MgCl₂, 0.01% Triton X-100, 2 mM spermidine, 20 mM DTT, 5 mM NTPs, 0.5 μM template, and 100 μg/mL T7 RNA polymerase. Reactions were incubated at 37° C. overnight. 20 units of DNase I (Promega #M6101)) were added per 1 mL of transcription volume and incubated for one hour. RNA products were purified via denaturing PAGE, ethanol precipitated, and resuspended in 1× phosphate buffered saline. To fold the sgRNAs, samples were heated to 70° C. for 5 min and then cooled to room temperature. The reactions were supplemented to 1 mM final MgCl₂ concentration, heated to 50° C. for 5 min and then cooled to room temperature. Final RNA guide products were stored at −80° C.

TABLE 10
Sequences for generation of guide RNA

| Primer | Primer sequence | RNA product |
|---|---|---|
| T7 promoter | GAAATTAATACGACTCACTATA (SEQ ID NO: | Used for all |
| primer | 491) | |
| sg2 backbone | GAAATTAATACGACTCACTATAGGTACTGGCGCTT | GGUACUGGCGCUUUU |
| fwd | TTATCTCATTACTTTGAGAGCCATCACGAGCGACT | ACUAUGUCGUAUGGG |
| | ATGTCGTATGGGTAAAG (SEQ ID NO: 492) | UAAAGCGCUUAUUUA |
| sg2 backbone | CTTTGATGCTTCTTATTTATCGGATTTCTCTCCGA | UCGGAGAGAAAUCCG |
| rev | TAAATAAGCGCTTTACCCATAC GACATAG TCGCTG | AUAAAUAAGAAGCAU |
| | GTGATGGC (SEQ ID NO: 493) | CAAAGGGCCGAGAUG |
| sg2.7.37 | CGGAGCGAGACATCTCGGCCCTTTGATGCTTCTTA | UCUCGCUCCG (SEQ |
| spacer primer | TTTATCGGATTTCTCTCCG (SEQ ID NO: | ID NO: 504) |
| | 494) | |
| sg32 backbone | GAAATTAATACGACTCACTATAGGTACTGGCGCTT | AUCUCAUUACUUUGA |
| fwd | TTATCTCATTACTTTGAGAGCCATCACCAGCGACT | GAGCCAUCACCAGCG |
| | ATGTCGTATGGGTAAAGCGC (SEQ ID NO: | GGUACUGGCGCUUUU |
| | 495) | ACUAUGUCGUAUGGG |
| sg32 backbone | CTTTGATGCTTCCCTCCGAAGAGGGCGCTTTACCC | UAAAGCGCCCUCUUC |
| rev | ATACGACATAG (SEQ ID NO: 496) | GGAGGGAAGCAUCAA |
| | | AGGGCCGAGAUGUCU |
| | | CG (SEQ ID NO: |
| | | 505) |
| sg32.7.37 | CGGAGCGAGACATCTCGGCCCTTTGATGCTTCCCT | AUCUCAUUACUUUGA |
| spacer primer | CCGAAGAG (SEQ ID NO: 497) | GAGCCAUCACCAGCG |
| sg64 backbone | GAAATTAATACGACTCACTATAGGTACTGGCGCCT | GGUACUGGCGCCUUU |
| fwd | TTATCTCATTACTTTGAGAGCCATCACCAGCGACT | ACUAUGUCGUAUGGG |
| | ATGTCGTATGGGTAAAGCGC (SEQ ID NO: | UAAAGCGCUUACGGA |
| | 498) | CUUCGGUCCGUAAGA |
| sg64 backbone | CTTTGATGCTTCTTACGGACCGAAGTCCGTAAGCG | AGCAUCAAAGGGCCG |
| rev | CTTTACCCATACGACATAG (SEQ ID NO: | AGAUGUCUCGCUCCG |
| | 499) | (SEQ ID NO: |
| sg64.7.37 | CGGAGCGAGACATCTCGGCCCTTTGATGCTTCTTA | 506) |
| spacer primer | CGGACCGAAG (SEQ ID NO: 500) | |
| sgl74 | GAAATTAATACGACTCACTATAACTGGCGCTTTTA | AUCUCAUUACUUUGA |
| backbone fwd | TCTGATTACTTTGAGAGCCATCACCAGCGACTATG | GAGCCAUCACCAGCG |
| | TCGTAGTGGGTAAAGCT (SEQ ID NO: 501) | ACUGGCGCUUUUAUC |
| sg174 | CTTTGATGCTCCCTCCGAAGAGGGAGCTTTACCCA | AUGUCGUAgUGGGUA |
| backbone rev | CTACGACATAGTCGC (SEQ ID NO: 502) | AAGCUCCCUCUUCGG |
| sg174.7.37 | CGGAGCGAGACATCTCGGCCCTTTGATGCTCCCTC | AGGGAGCAUCAAAGG |
| spacer primer | C (SEQ ID NO: 503) | UgAUUACUUUGAGAG |
| | | CCAUCACCAGCGACU |
| | | GCCGAGAUGUCUCGC |
| | | UCCG (SEQ ID |
| | | NO: 507) |

### Example 7: RNP Assembly

[0566] Purified wild-type and RNP of CasX and single guide RNA (sgRNA) were either prepared immediately before experiments or prepared and snap-frozen in liquid nitrogen and stored at −80° C. for later use. To prepare the RNP complexes, the CasX protein was incubated with sgRNA at 1:1.2 molar ratio. Briefly, sgRNA was added to Buffer #1 (25 mM NaPi, 150 mM NaCl, 200 mM trehalose, 1 mM MgCl2), then the CasX was added to the sgRNA solution, slowly with swirling, and incubated at 37° C. for 10 min to form RNP complexes. RNP complexes were filtered before use through a 0.22 μm Costar 8160 filters that were pre-wet with 200 μl Buffer #1. If needed, the RNP sample was concentrated with a 0.5 ml Ultra 100-Kd cutoff filter, (Millipore part #UFC510096), until the desired volume was obtained. Formation of competent RNP was assessed as described in Example 12.

### Example 8: Assessing Binding Affinity to the Guide RNA

[0567] Purified wild-type and improved CasX will be incubated with synthetic single-guide RNA containing a 3′ Cy7.5 moiety in low-salt buffer containing magnesium chloride as well as heparin to prevent non-specific binding and aggregation. The sgRNA will be maintained at a concentration of 10 pM, while the protein will be titrated from 1 pM to 100 μM in separate binding reactions. After allowing the reaction to come to equilibrium, the samples will be run through a vacuum manifold filter-binding assay with a nitrocellulose membrane and a positively charged nylon membrane, which bind protein and nucleic acid, respectively. The membranes will be imaged to identify guide RNA, and the fraction of bound vs unbound RNA will be determined by the amount of fluorescence on the nitrocellulose vs nylon membrane for each protein concentration to calculate the dissociation constant of the protein-sgRNA complex. The experiment will also be carried out with improved variants of the sgRNA to determine if these mutations also affect the affinity of the guide for the wild-type and mutant proteins. We will also perform electromobility shift assays to qualitatively compare to the filter-binding assay and confirm that soluble binding, rather than aggregation, is the primary contributor to protein-RNA association.

### Example 9: Assessing Binding Affinity to the Target DNA

[0568] Purified wild-type and improved CasX will be complexed with single-guide RNA bearing a targeting sequence complementary to the target nucleic acid. The RNP complex will be incubated with double-stranded target DNA containing a PAM and the appropriate target nucleic acid sequence with a 5′ Cy7.5 label on the target strand in low-salt buffer containing magnesium chloride as well as heparin to prevent non-specific binding and aggregation. The target DNA will be maintained at a concentration of 1 nM, while the RNP will be titrated from 1 pM to 100 μM in separate binding reactions. After allowing the reaction to come to equilibrium, the samples will be run on a native 5% polyacrylamide gel to separate bound and unbound target DNA. The gel will be imaged to identify mobility shifts of the target DNA, and the fraction of bound vs unbound DNA will be calculated for each protein concentration to determine the dissociation constant of the RNP-target DNA ternary complex. The experiments are expected to demonstrate the improved binding affinity of the RNP comprising a CasX variant and gNA variant compared to an RNP comprising a reference CasX and reference gNA.

### Example 10: Editing of Gene Targets PCSK9, PMP22, TRAC, SOD1, B2M and HTT

[0569] The purpose of this study was to evaluate the ability of the CasX variant 119 and gNA variant 174 to edit nucleic acid sequences in six gene targets.

### Materials and Methods

[0570] Spacers for all targets except B2M and SOD1 were designed in an unbiased manner based on PAM requirements (TTC or CTC) to target a desired locus of interest. Spacers targeting B2M and SOD1 had been previously identified within targeted exons via lentiviral spacer screens carried out for these genes. Designed spacers for the other targets were ordered from Integrated DNA Technologies (IDT) as single-stranded DNA (ssDNA) oligo pairs. ssDNA spacer pairs were annealed together and cloned via Golden Gate cloning into a base mammalian-expression plasmid construct that contains the following components: codon optimized Cas X 119 protein+NLS under an EF1A promoter, guide scaffold 174 under a U6 promoter, carbenicillin and puromycin resistance genes. Assembled products were transformed into chemically-competent E. coli, plated on Lb-Agar plates (LB: Teknova Cat #L9315, Agar: Quartzy Cat #214510) containing carbenicillin and incubated at 37° C. Individual colonies were picked and miniprepped using Qiagen Qiaprep spin Miniprep Kit (Qiagen Cat #27104) following the manufacturer's protocol. The resulting plasmids were sequenced through the guide scaffold region via Sanger sequencing (Quintara Biosciences) to ensure correct ligation.

[0571] HEK 293T cells were grown in Dulbecco's Modified Eagle Medium (DMEM; Corning Cellgro, #10-013-CV) supplemented with 10% fetal bovine serum (FBS; Seradigm, #1500-500), 100 Units/ml penicillin and 100 mg/ml streptomycin (100×-Pen-Strep; GIBCO #15140-122), sodium pyruvate (100×, Thermofisher #11360070), non-essential amino acids (100× Thermofisher #11140050), HEPES buffer (100× Thermofisher #15630080), and 2-mercaptoethanol (1000× Thermofisher #21985023). Cells were passed every 3-5 days using TryplE and maintained in an incubator at 37° C. and 5% CO2.

[0572] On day 0, HEK293T cells were seeded in 96-well, flat-bottom plates at 30 k cells/well. On day 1, cells were transfected with 100 ng plasmid DNA using Lipofectamine 3000 according to the manufacturer's protocol. On day 2, cells were switched to FB medium containing puromycin. On day 3, this media was replaced with fresh FB medium containing puromycin. The protocol after this point diverged depending on the gene of interest. Day 4 for PCSK9, PMP22, and TRAC: cells were verified to have completed selection and switched to FB medium without puromycin. Day 4 for B2M, SOD1, and HTT: cells were verified to have completed selection and passed 1:3 using TryplE into new plates containing FB medium without puromycin. Day 7 for PCSK9, PMP22, and TRAC: cells were lifted from the plate, washed in dPBS, counted, and resuspended in Quick Extract (Lucigen, QE09050) at 10,000 cells/W. Genomic DNA was extracted according to the manufacturer's protocol and stored at −20° C. Day 7 for B2M, SOD1, and HTT: cells were lifted from the plate, washed in dPBS, and genomic DNA was extracted with the Quick-DNA Miniprep Plus Kit (Zymo, D4068) according to the manufacturer's protocol and stored at −20° C.

[0573] NGS Analysis: Editing in cells from each experimental sample was assayed using next generation sequencing (NGS) analysis. All PCRs were carried out using the KAPA HiFi HotStart ReadyMix PCR Kit (KR0370). The template for genomic DNA sample PCR was 5 μl of genomic DNA in QE at 10 k cells/μL for PCSK9, PMP22, and TRAC. The template for genomic DNA sample PCR was 400 ng of genomic DNA in water for B2M, SOD1, and HTT. Primers were designed specific to the target genomic location of interest to form a target amplicon. These primers contain additional sequence at the 5′ ends to introduce Illumina read and 2 sequences. Further, they contain a 7 nt randomer sequence that functions as a unique molecular identifier (UMI). Quality and quantification of the amplicon was assessed using a Fragment Analyzer DNA analyzer kit (Agilent, dsDNA 35-1500 bp). Amplicons were sequenced on the Illumina Miseq according to the manufacturer's instructions. Resultant sequencing reads were aligned to a reference sequence and analyzed for indels. Samples with editing that did not align to the estimated cut location or with unexpected alleles in the spacer region were discarded.

### Results

[0574] In order to validate the editing effected by the CasX:gNA 119.174 at a variety of genetic loci, a clonal plasmid transfection experiment was performed in HEK 293T cells. Multiple spacers (Table 11, listing the encoding DNA and the RNA sequences of the actual gNA spacers) were designed and cloned into an expression plasmid encoding the CasX 119 nuclease and guide 174 scaffold. HEK 293T cells were transfected with plasmid DNA, selected with puromycin, and harvested for genomic DNA six days post-transfection. Genomic DNA was analyzed via next generation sequencing (NGS) and aligned to a reference DNA sequence for analysis of insertions or deletions (indels). CasX:gNA 119.174 was able to efficiently generate indels across the 6 target genes, as shown in FIGS. 9 and 10. Indel rates varied between spacers, but median editing rates were consistently at 60% or higher, and in some cases, indel rates as high as 91% were observed. Additionally, spacers with non-canonical CTC PAMs were demonstrated to be able to generate indels with all tested target genes (FIG. 11).

[0575] The results demonstrate that the CasX variant 119 and gNA variant 174 can consistently and efficiently generate indels at a wide variety of genetic loci in human cells. The unbiased selection of many of the spacers used in the assays shows the overall effectiveness of the 119.174 RNP molecules to edit genetic loci, while the ability to target to spacers with both a TTC and a CTC PAM demonstrates its increased versatility compared to reference CasX that edit only with the TTC PAM.

TABLE 11
Spacer sequences targeting each genetic locus.

| Gene | Spacer | PAM | Spacer DNA Sequence | Spacer RNA Sequence |
|---|---|---|---|---|
| PCSK9 | 6.1 | TTC | GAGGAGGACGGCCTGGCCG | GAGGAGGACGGCCUGGCCGA |
| | | | A (SEQ ID NO: 508) | (SEQ ID NO: 552) |
| PCSK9 | 6.2 | TTC | ACCGCTGCGCCAAGGTGCG | ACCGCUGCGCCAAGGUGCGG |
| | | | G (SEQ ID NO: 509) | (SEQ ID NO: 553) |
| PCSK9 | 6.4 | TTC | GCCAGGCCGTCCTCCTCGG | GCCAGGCCGUCCUCCUCGGA |
| | | | A (SEQ ID NO: 510) | (SEQ ID NO: 554) |
| PCSK9 | 6.5 | TTC | GTGCTCGGGTGCTTCGGCC | GUGCUCGGGUGCUUCGGCCA |
| | | | A (SEQ ID NO: 511) | (SEQ ID NO: 555) |
| PCSK9 | 6.3 | TTC | ATGGCCTTCTTCCTGGCTT | AUGGCCUUCUUCCUGGCUUC |
| | | | C (SEQ ID NO: 512) | (SEQ ID NO: 556) |
| PCSK9 | 6.6 | TTC | GCACCACCACGTAGGTGCC | GCACCACCACGUAGGUGCCA |
| | | | A (SEQ ID NO: 513) | (SEQ ID NO: 557) |
| PCSK9 | 6.7 | TTC | TCCTGGCTTCCTGGTGAAG | UCCUGGCUUCCUGGUGAAGA |
| | | | A (SEQ ID NO: 514) | (SEQ ID NO: 558) |
| PCSK9 | 6.8 | TTC | TGGCTTCCTGGTGAAGATG | UGGCUUCCUGGUGAAGAUGA |
| | | | A (SEQ ID NO: 515) | (SEQ ID NO: 559) |
| PCSK9 | 6.9 | TTC | CCAGGAAGCCAGGAAGAAG | CCAGGAAGCCAGGAAGAAGG |
| | | | G (SEQ ID NO: 516) | (SEQ ID NO: 560) |
| PCSK9 | 6.10 | TTC | TCCTTGCATGGGGCCAGGA | UCCUUGCAUGGGGCCAGGAU |
| | | | T (SEQ ID NO: 517) | (SEQ ID NO: 561) |
| PMP22 | 18.16 | TTC | GGCGGCAAGTTCTGCTCAG | GGCGGCAAGUUCUGCUCAGC |
| | | | C (SEQ ID NO: 518) | (SEQ ID NO: 562) |
| PMP22 | 18.17 | TTC | TCTCCACGATCGTCAGCGT | UCUCCACGAUCGUCAGCGUG |
| | | | G (SEQ ID NO: 519) | (SEQ ID NO: 563) |
| PMP22 | 18.18 | CTC | ACGATCGTCAGCGTGAGTG | ACGAUCGUCAGCGUGAGUGC |
| | | | C (SEQ ID NO: 520) | (SEQ ID NO: 564) |
| PMP22 | 18.1 | TTC | CTCTAGCAATGGATCGTGG | CUCUAGCAAUGGAUCGUGGG |
| | | | G (SEQ ID NO: 521) | (SEQ ID NO: 565) |
| TRAC | 15.3 | TTC | CAAACAAATGTGTCACAAA | CAAACAAAUGUGUCACAAAG |
| | | | G (SEQ ID NO: 522) | (SEQ ID NO: 566) |
| TRAC | 15.4 | TTC | GATGTGTATATCACAGACA | GAUGUGUAUAUCACAGACAA |
| | | | A (SEQ ID NO: 523) | (SEQ ID NO: 567) |
| TRAC | 15.5 | TTC | GGAATAATGCTGTTGTTGA | GGAAUAAUGCUGUUGUUGAA |
| | | | A (SEQ ID NO: 524) | (SEQ ID NO: 568) |
| TRAC | 15.9 | TTC | AAATCCAGTGACAAGTCTG | AAAUCCAGUGACAAGUCUGU |
| | | | T (SEQ ID NO: 525) | (SEQ ID NO: 569) |
| TRAC | 15.10 | TTC | AGGCCACAGCACTGTTGCT | AGGCCACAGCACUGUUGCUC |
| | | | C (SEQ ID NO: 526) | (SEQ ID NO: 570) |
| TRAC | 15.21 | TTC | AGAAGACACCTTCTTCCCC | AGAAGACACCUUCUUCCCCA |
| | | | A (SEQ ID NO: 527) | (SEQ ID NO: 571) |
| TRAC | 15.22 | TTC | TCCCCAGCCCAGGTAAGGG | UCCCCAGCCCAGGUAAGGGC |
| | | | C (SEQ ID NO: 528) | (SEQ ID NO: 572) |
| TRAC | 15.23 | TTC | CCAGCCCAGGTAAGGGCAG | CCAGCCCAGGUAAGGGCAGC |
| | | | C (SEQ ID NO: 529) | (SEQ ID NO: 573) |
| HTT | 5.1 | TTC | AGTCCCTCAAGTCCTTCCA | AGUCCCUCAAGUCCUUCGAG |
| | | | G (SEQ ID NO: 530) | (SEQ ID NO: 574) |
| HTT | 5.2 | TTC | AGCAGCAGCAGCAGCAGCA | AGCAGCAGCAGCAGCAGCAG |
| | | | G (SEQ ID NO: 531) | (SEQ ID NO: 575) |
| HTT | 5.3 | TTC | TCAGCCGCCGCCGCAGGCA | UCAGCCGCCGCCGCAGGCAC |
| | | | C (SEQ ID NO: 532) | (SEQ ID NO: 576) |
| HTT | 5.4 | TTC | AGGGTCGCCATGGCGGTCT | AGGGUCGCCAUGGCGGUCUC |
| | | | C (SEQ ID NO: 533) | (SEQ ID NO: 577) |
| HTT | 5.5 | TTC | TCAGCTTTTCCAGGGTCGC | UCAGCUUUUCCAGGGUCGCC |
| | | | C (SEQ ID NO: 534) | (SEQ ID NO: 578) |
| HTT | 5.7 | CTC | GCCGCAGCCGCCCCCGCCG | GCCGCAGCCGCCCCCGCCGC |
| | | | C (SEQ ID NO: 535) | (SEQ ID NO: 579) |
| HTT | 5.8 | CTC | GCCACAGCCGGGCCGGGTG | GCCACAGCCGGGCCGGGUGG |
| | | | G (SEQ ID NO: 536) | (SEQ ID NO: 580) |
| HTT | 5.9 | CTC | TCAGCCACAGCCGGGCCGG | UCAGCCACAGCCGGGCCGGG |
| | | | G (SEQ ID NO: 537) | (SEQ ID NO: 581) |
| HTT | 5.10 | CTC | CGGTCGGTGCAGCGGCTCC | CGGUCGGUGCAGCGGCUCCU |
| | | | T (SEQ ID NO: 538) | (SEQ ID NO: 582) |
| SOD1 | 8.56 | TTC | CCACACCTTCACTGGTCCA | CCAGACCUUCACUGGUCCAU |
| | | | T (SEQ ID NO: 539) | (SEQ ID NO: 583) |
| SOD1 | 8.57 | TTC | TAAAGGAAAGTAATGGACC | UAAAGGAAAGUAAUGGACCA |
| | | | A (SEQ ID NO: 540) | (SEQ ID NO: 584) |
| SOD1 | 8.58 | TTC | CTGGTCCATTACTTTCCTT | CUGGUCCAUUACUUUCCUUU |
| | | | T (SEQ ID NO: 541) | (SEQ ID NO: 585) |
| SOD1 | 8.2 | TTC | ATGTTCATGAGTTTGGAGA | AUGUUCAUGAGUUUGGAGAU |
| | | | T (SEQ ID NO: 542) | (SEQ ID NO: 586) |
| SOD1 | 8.68 | TTC | TGAGTTTGGAGATAATAGA | UGAGUUUGGAGAUAAUACAG |
| | | | G (SEQ ID NO: 543) | (SEQ ID NO: 587) |
| SOD1 | 8.59 | TTC | ATAGACACATCGGCCACAC | AUAGACACAUCGGCCACACC |
| | | | C (SEQ ID NO: 544) | (SEQ ID NO: 588) |
| SOD1 | 8.47 | TTC | TTATTAGGCATGTTGGAGA | UUAUUAGGCAUGUUGGAGAC |
| | | | C (SEQ ID NO: 545) | (SEQ ID NO: 589) |
| SOD1 | 8.62 | CTC | CAGGAGACCATTGCATCAT | CAGGAGACCAUUGCAUCAUU |
| | | | T (SEQ ID NO: 546) | (SEQ ID NO: 590) |
| B2M | 7.120 | TTC | GGCCTGGAGGCTATCCAGC | GGCCUGGAGGCUAUCCAGCG |
| | | | G (SEQ ID NO: 547) | (SEQ ID NO: 591) |
| B2M | 7.37 | TTC | GGCCGAGATGTCTCGCTCC | GGCCGAGAUGUCUCGCUCCG |
| | | | G (SEQ ID NO: 548) | (SEQ ID NO: 592) |
| B2M | 7.43 | CTC | AGGCCAGAAAGAGAGAGTA | AGGCCAGAAAGAGAGAGUAG |
| | | | G (SEQ ID NO: 549) | (SEQ ID NO: 593) |
| B2M | 7.119 | CTC | CGCTGGATAGCCTCCAGGC | CGCUGGAUAGCCUCCAGGCC |
| | | | C (SEQ ID NO: 550) | (SEQ ID NO: 594) |
| B2M | 7.14 | TTC | TGAAGCTGACAGCATTCGG | UGAAGCUGACAGCAUUCGGG |
| | | | G (SEQ ID NO: 551) | (SEQ ID NO: 595) |

### Example 11: Assessing Differential PAM Recognition In Vitro

[0576] Purified wild-type and engineered CasX variants will be complexed with single-guide RNA bearing a fixed targeting sequence. The RNP complexes will be added to buffer containing MgCl2 at a final concentration of 100 nM and incubated with 5′ Cy7.5-labeled double-stranded target DNA at a concentration of 10 nM. Separate reactions will be carried out with different DNA substrates containing different PAMs adjacent to the target nucleic acid sequence. Aliquots of the reactions will be taken at fixed time points and quenched by the addition of an equal volume of 50 mM EDTA and 95% formamide. The samples will be run on a denaturing polyacrylamide gel to separate cleaved and uncleaved DNA substrates. The results will be visualized and the rate of cleavage of the non-canonical PAMs by the CasX variants will be determined.

### Example 12: CasX:gNA In Vitro Cleavage Assays

### 1. Determining Cleavage-Competent Fractions for Protein Variants Compared to Wild-Type Reference CasX

[0577] The ability of CasX variants to form active RNP compared to reference CasX was determined using an in vitro cleavage assay. The beta-2 microglobulin (B2M) 7.37 target for the cleavage assay was created as follows. DNA oligos with the sequence TGAAGCTGACAGCATTCGGGCCGAGATGTCTCGCTCCGTGGCCTTAGCTGTGCTCGC GCT (non-target strand, NTS (SEQ ID NO: 596)) and TGAAGCTGACAGCATTCGGGCCGAGATGTCTCGCTCCGTGGCCTTAGCTGTGCTCGC GCT (target strand, TS (SEQ ID NO: 597)) were purchased with 5′ fluorescent labels (LI-COR IRDye 700 and 800, respectively). dsDNA targets were formed by mixing the oligos in a 1:1 ratio in 1× cleavage buffer (20 mM Tris HCl pH 7.5, 150 mM NaCl, 1 mM TCEP, 5% glycerol, 10 mM MgCl₂), heating to 95° C. for 10 minutes, and allowing the solution to cool to room temperature.

[0578] CasX RNPs were reconstituted with the indicated CasX and guides (see graphs) at a final concentration of 1 μM with 1.5-fold excess of the indicated guide unless otherwise specified in 1× cleavage buffer (20 mM Tris HCl pH 7.5, 150 mM NaCl, 1 mM TCEP, 5% glycerol, 10 mM MgCl₂) at 37° C. for 10 min before being moved to ice until ready to use. The 7.37 target was used, along with sgRNAs having spacers complementary to the 7.37 target.

[0579] Cleavage reactions were prepared with final RNP concentrations of 100 nM and a final target concentration of 100 nM. Reactions were carried out at 37° C. and initiated by the addition of the 7.37 target DNA. Aliquots were taken at 5, 10, 30, 60, and 120 minutes and quenched by adding to 95% formamide, 20 mM EDTA. Samples were denatured by heating at 95° C. for 10 minutes and run on a 10% urea-PAGE gel. The gels were either imaged with a LI-COR Odyssey CLx and quantified using the LI-COR Image Studio software or imaged with a Cytiva Typhoon and quantified using the Cytiva IQTL software. The resulting data were plotted and analyzed using Prism. We assumed that CasX acts essentially as a single-turnover enzyme under the assayed conditions, as indicated by the observation that sub-stoichiometric amounts of enzyme fail to cleave a greater-than-stoichiometric amount of target even under extended time-scales and instead approach a plateau that scales with the amount of enzyme present. Thus, the fraction of target cleaved over long time-scales by an equimolar amount of RNP is indicative of what fraction of the RNP is properly formed and active for cleavage. The cleavage traces were fit with a biphasic rate model, as the cleavage reaction clearly deviates from monophasic under this concentration regime, and the plateau was determined for each of three independent replicates. The mean and standard deviation were calculated to determine the active fraction (Table 12). The graphs are shown in FIG. 12.

[0580] Apparent active (competent) fractions were determined for RNPs formed for CasX2+guide 174+7.37 spacer, CasX119+guide 174+7.37 spacer, CasX457+guide 174+7.37 spacer, CasX488+guide 174+7.37 spacer, and CasX491+guide 174+7.37 spacer. The determined active fractions are shown in Table 12. All CasX variants had higher active fractions than the wild-type CasX2, indicating that the engineered CasX variants form significantly more active and stable RNP with the identical guide under tested conditions compared to wild-type CasX. This may be due to an increased affinity for the sgRNA, increased stability or solubility in the presence of sgRNA, or greater stability of a cleavage-competent conformation of the engineered CasX: sgRNA complex. An increase in solubility of the RNP was indicated by a notable decrease in the observed precipitate formed when CasX457, CasX488, or CasX491 was added to the sgRNA compared to CasX2.

2. In Vitro Cleavage Assays—Determining k_{cleave} for CasX Variants Compared to Wild-Type Reference CasX

[0581] Cleavage-competent fractions were also determined using the same protocol for CasX2.2.7.37, CasX2.32.7.37, CasX2.64.7.37, and CasX2.174.7.37 to be 16±3%, 13±3%, 5±2%, and 22±5%, as shown in FIG. 13 and Table 12.

[0582] A second set of guides were tested under different conditions to better isolate the contribution of the guide to RNP formation. 174, 175, 185, 186, 196, 214, and 215 guides with 7.37 spacer were mixed with CasX491 at final concentrations of 1 μM for the guide and 1.5 μM for the protein, rather than with excess guide as before. Results are shown in FIG. 14 and Table 12. Many of these guides exhibited additional improvement over 174, with 185 and 196 achieving 44% and 46% competent fractions, respectively, compared with 17% for 174 under these guide-limiting conditions.

[0583] The data indicate that both CasX variants and sgRNA variants are able to form a higher degree of active RNP with guide RNA compare to wild-type CasX and wild-type sgRNA.

[0584] The apparent cleavage rates of CasX variants 119, 457, 488, and 491 compared to wild-type reference CasX were determined using an in vitro fluorescent assay for cleavage of the target 7.37.

[0585] CasX RNPs were reconstituted with the indicated CasX (see FIG. 15) at a final concentration of 1 μM with 1.5-fold excess of the indicated guide in 1× cleavage buffer (20 mM Tris HCl pH 7.5, 150 mM NaCl, 1 mM TCEP, 5% glycerol, 10 mM MgCl₂) at 37° C. for 10 min before being moved to ice until ready to use. Cleavage reactions were set up with a final RNP concentration of 200 nM and a final target concentration of 10 nM. Reactions were carried out at 37° C. except where otherwise noted and initiated by the addition of the target DNA. Aliquots were taken at 0.25, 0.5, 1, 2, 5, and 10 minutes and quenched by adding to 95% formamide, 20 mM EDTA. Samples were denatured by heating at 95° C. for 10 minutes and run on a 10% urea-PAGE gel. The gels were imaged with a LI-COR Odyssey CLx and quantified using the LI-COR Image Studio software or imaged with a Cytiva Typhoon and quantified using the Cytiva IQTL software. The resulting data were plotted and analyzed using Prism, and the apparent first-order rate constant of non-target strand cleavage (k_{cleave}) was determined for each CasX: sgRNA combination replicate individually. The mean and standard deviation of three replicates with independent fits are presented in Table 12, and the cleavage traces are shown in FIG. 15.

[0586] Apparent cleavage rate constants were determined for wild-type CasX2, and CasX variants 119, 457, 488, and 491 with guide 174 and spacer 7.37 utilized in each assay (see Table 12 and FIG. 15). All CasX variants had improved cleavage rates relative to the wild-type CasX2. CasX457 cleaved more slowly than 119, despite having a higher competent fraction as determined above. CasX488 and CasX491 had the highest cleavage rates by a large margin; as the target was almost entirely cleaved in the first timepoint, the true cleavage rate exceeds the resolution of this assay, and the reported k_{cleave} should be taken as a lower bound.

[0587] The data indicate that the CasX variants have a higher level of activity, with k_{cleave} rates reaching at least 30-fold higher compared to wild-type CasX2.

### 3. In Vitro Cleavage Assays: Comparison of Guide Variants to Wild-Type Guides

[0588] Cleavage assays were also performed with wild-type reference CasX2 and reference guide 2 compared to guide variants 32, 64, and 174 to determine whether the variants improved cleavage. The experiments were performed as described above. As many of the resulting RNPs did not approach full cleavage of the target in the time tested, we determined initial reaction velocities (Vo) rather than first-order rate constants. The first two timepoints (15 and 30 seconds) were fit with a line for each CasX:sgRNA combination and replicate. The mean and standard deviation of the slope for three replicates were determined.

[0589] Under the assayed conditions, the Vo for CasX2 with guides 2, 32, 64, and 174 were 20.4±1.4 nM/min, 18.4±2.4 nM/min, 7.8±1.8 nM/min, and 49.3±1.4 nM/min (see Table 12 and FIGS. 16-17). Guide 174 showed substantial improvement in the cleavage rate of the resulting RNP (˜2.5-fold relative to 2, see FIG. 17), while guides 32 and 64 performed similar to or worse than guide 2. Notably, guide 64 supports a cleavage rate lower than that of guide 2 but performs much better in vivo (data not shown). Some of the sequence alterations to generate guide 64 likely improve in vivo transcription at the cost of a nucleotide involved in triplex formation. Improved expression of guide 64 likely explains its improved activity in vivo, while its reduced stability may lead to improper folding in vitro.

[0590] Additional experiments were carried out with guides 174, 175, 185, 186, 196, 214, and 215 with spacer 7.37 and CasX491 to determine relative cleavage rates. To reduce cleavage kinetics to a range measurable with our assay, the cleavage reactions were incubated at 10° C. Results are in FIG. 18 and Table 12. Under these conditions, 215 was the only guide that supported a faster cleavage rate than 174. 196, which exhibited the highest active fraction of RNP under guide-limiting conditions, had kinetics essentially the same as 174, again highlighting that different variants result in improvements of distinct characteristics.

[0591] The data support that, under the conditions of the assay, use of the majority of the guide variants with CasX results in RNP with a higher level of activity than one with the wild-type guide, with improvements in initial cleavage velocity ranging from ˜2-fold to >6-fold. Numbers in Table 12 indicate, from left to right, CasX variant, sgRNA scaffold, and spacer sequence of the RNP construct. In the RNP construct names in the table below, CasX protein variant, guide scaffold and spacer are indicated from left to right.

TABLE 12
Results of cleavage and RNP formation assays

| RNP | | | Initial | | |
|---|---|---|---|---|---|
| Construct | k_{cleave}* | | velocity* | | Competent fraction |
| 2.2.7.37 | | | 20.4 ± 1.4 | nM/min | 16 ± 3% |
| 2.32.7.37 | | | 18.4 ± 2.4 | nM/min | 13 ± 3% |
| 2.64.7.37 | | | 7.8 ± 1.8 | nM/min | 5 ± 2% |
| 2.174.7.37 | 0.51 ± 0.01 | min⁻¹ | 49.3 ± 1.4 | nM/min | 22 ± 5% |

| 119.174.7.37 | 6.29 ± 2.11 | min⁻¹ | 35 ± 6% | |
|---|---|---|---|---|
| 457.174.7.37 | 3.01 ± 0.90 | min⁻¹ | 53 ± 7% | |
| 488.174.7.37 | 15.19 | min⁻¹ | 67% | |
| 491.174.7.37 | 16.59 | min⁻¹/ | 83%/17% | (guide-limited) |
| | 0.293 | min⁻¹ (10° C.) | | |
| 491.175.7.37 | 0.089 | min⁻¹ (10° C.) | 5% | (guide-limited) |
| 491.185.7.37 | 0.227 | min⁻¹ (10° C.) | 44% | (guide-limited) |
| 491.186.7.37 | 0.099 | min⁻¹ (10° C.) | 11% | (guide-limited) |
| 491.196.7.37 | 0.292 | min⁻¹ (10° C.) | 46% | (guide-limited) |
| 491.214.7.37 | 0.284 | min⁻¹ (10° C.) | 30% | (guide-limited) |
| 491.215.7.37 | 0.398 | min⁻¹ (10° C.) | 38% | (guide-limited) |

*Mean and standard deviation

### Example 13: CasX:gNA Editing of PCSK9

[0592] This example sets forth the parameters to make and test compositions capable of modifying a PCSK9 locus.

### Experimental Design:

### A) PCSK9-Modifying Spacer Selection Process:

[0593] 20 bp XTC PAM spacers will be designed to target the following regions in the human genome:
[0594] (a) PCSK9 cis enhancer elements
[0595] (b) PCSK9 proximal non-coding genetic elements highly conserved across vertebrates (UCSC genome browser)
[0596] (c) PCSK9 genomic locus. The PCSK9 gene is defined as the sequence that spans chr1:55,039,476-55,064,853 of the human genome (GRCh38/hg38) (the notation refers to the chromosome 1 (chr1), starting at the 55,039,476 bp to 55,064,853 bp on chromosome 1 (Homo sapiens Updated Annotation Release 109.20190905, GRCh38.p13) (NCBI). PCSK9 targeting spacers may be similarly assembled from other genomes.

### B) Methods for Generating PCSK9 Targeting Constructs:

[0597] In order to generate PCSK9 targeting constructs, the PCSK9 targeting spacers of Table 11 will be cloned into a base mammalian-expression plasmid construct (pStX) that is comprised of the following components: codon optimized CasX (construct CasX 119 molecule and rRNA guide 174 (119.174); see Tables for sequences)+NLS; and a mammalian selection marker, puromycin. Spacer sequence DNA will be ordered as single-stranded DNA (ssDNA) oligos from Integrated DNA Technologies (IDT) consisting of the spacer sequence and the reverse complement of this sequence. These two oligos will be annealed together and cloned into pStX individually or in bulk by Golden Gate Assembly using T4 DNA Ligase (New England BioLabs Cat #M0202L) and an appropriate restriction enzyme for the plasmid. Assembled products will be transformed into chemically- or electro-competent bacterial cells, plated on Lb-Agar plates (LB: Teknova Cat #L9315, Agar: Quartzy Cat #214510) containing carbenicillin and incubated until colonies appeared. Individual colonies will be picked and miniprepped using a Qiagen Qiaprep spin Miniprep Kit (Qiagen Cat #27104), following the manufacturer's protocol. The resultant plasmids will be sequenced using Sanger sequencing to ensure correct ligation. SaCas9 and SpyCas9 control plasmids, with spacers chosen based on Cas protein-specific PAMs, will be prepared similarly to pStX plasmids described above.

### C) Methods to Generate PCSK9 Reporter Line:

[0598] A fluorescent-encoding DNA (e.g., GFP) will be knocked in at the 3′ end of the last PCSK9 exon in a HEPG2 cell line. The modified cells will be expanded by serial passage every 3-5 days and maintained in Fibroblast (FB), consisting of Dulbecco's Modified Eagle Medium (DMEM; Corning Cellgro, #10-013-CV) supplemented with 10% fetal bovine serum (FBS; Seradigm, #1500-500), or other appropriate medium, and 100 Units/ml penicillin and 100 mg/ml streptomycin (100×-Pen-Strep; GIBCO #15140-122), and can additionally include sodium pyruvate (100×, Thermofisher #11360070), non-essential amino acids (100× Thermofisher #11140050), HEPES buffer (100× Thermofisher #15630080), and 2-mercaptoethanol (1000× Thermofisher #21985023). The cells will be incubated at 37° C. and 5% CO2. After 1-2 weeks, single GFP+ cells will be sorted into FB or other appropriate medium. The reporter line clones will be expanded by serial passage every 3-5 days and maintained in FB medium in an incubator at 37° C. and 5% CO2. The lines will be characterized via genomic sequencing, and functional modification of the PCSK9 locus using a PCSK9 targeting molecule. The optimal reporter lines will be identified as ones that i) had a single copy of GFP correctly integrated at the target PCSK9 locus, ii) maintained doubling times equivalent to unmodified cells, iii) resulted in reduction in GFP fluorescence upon disruption of the PCSK9 gene when assayed using the methods described, below.

### D) Methods to Assess PCSK9 Modifying Activity in PCSK9-GFP Reporter Cell Line:

[0599] PCSK9 reporter cells will be seeded at 20-40 k cells/well in a 96 well plate in 100 μl of FB (or other appropriate) medium and cultured in a 37° C. incubator with 5% CO2. The following day, confluence of seeded cells will be checked. Ideally, cells should be at ˜75% confluence at time of transfection. If cells will be at the right confluence, transfection will be carried out.

[0600] Each CasX construct (CasX 119 and guide 174) with appropriate spacers targeting PCSK9 will be transfected at 100-500 ng per well using Lipofectamine 3000 following the manufacturer's protocol, using 3 wells per construct as replicates. SaCas9 and SpyCas9 targeting PCSK9 will be used as benchmarking controls. For each Cas protein type, a non-targeting plasmid will be used as a negative control.

[0601] After 24-48 hours of puromycin selection at 0.3-3 μg/ml, to select for successfully transfected cells, followed by 24-48 hours of recovery in FB or other appropriate medium, fluorescence in transfected cells will be analyzed via flow cytometry. In this process, cells will be gated for the appropriate forward and side scatter, selected for single cells and then gated for reporter expression (Attune Nxt Flow Cytometer, Thermo Fisher Scientific) to quantify the expression levels of fluorophores. At least 10,000 events will be collected for each sample. The data will be used to calculate the percentage of antibody-label negative (edited) cells.

[0602] A subset of cells for each sample from the example will be lysed, and genome extracted using a Quick extract solution following the manufacturer's protocol. Editing will be analyzed using a T7E1 assay. Briefly, the genomic locus at the targeted edit site will be amplified using primers (e.g., a 500 bp region around the intended target) using a PCR program on a thermocycler. The PCR amplicon will be then hybridized following a hybridization program on a thermocycler, and then treated with T7 Endonuclease for 30 mins at 37° C. The sample will be then analyzed on a 2% agarose gel, or on a Fragment Analyzer to visualize DNA bands.

### Example 14: Methods to Assess PCSK9 Modifying Activity in HEPG2 or HEK293T Cells

[0603] HEPG2 cells or HEK293T cells will be seeded at 20-40 k cells/well in a 96 well plate in 100 μl of FB medium and cultured in a 37° C. incubator with 5% CO2. The following day, confluence of seeded cells will be checked. Cells should be at ˜75% confluence at time of transfection. If cells are at the right confluence, transfection will be carried out.

[0604] CasX construct 119 with guide 174 and the spacers of Table 11 targeting PCSK9 will be transfected at 100-500 ng per well using Lipofectamine 3000 following the manufacturer's protocol, and placed into 3 wells per construct as replicates. A non-targeting plasmid will be used as a negative control. After 24-48 hours of puromycin selection at 1-3 μg/ml to select for successfully transfected cells, followed by 24-48 hours of recovery in FB medium, cells will be analyzed for editing by the T7E1 assay as described above or by Western blotting, as described below.

### Example 15: Methods to Package PCSK9 Targeting CasX Constructs in a Lentiviral Vector

[0605] Lentiviral particles packaging PCSK9 targeting CasX:gNA constructs (e.g., CasX 119 of Example 2 and guide 174 of Example 6 and the spacers of Table 11 or encoding any one of SEQ ID NOS: 315-436, 612-2100, or 2286-13861) targeting PCSK9 will be produced by transfecting HEK293T at a confluency of 70%-90% using polyethyleneimine based transfection of transgene plasmids encoding CasX, the guide RNA, the lentiviral packaging plasmid, and the VSV-G envelope plasmids. For lentiviral particle production, media will be changed 12 hours post-transfection, and the virus will be harvested at 36-48 hours post-transfection. Viral supernatants will be filtered using 0.45 μm membrane filters, and diluted in FB media (Fibroblast medium, comprised of: DMEM with Glutamax (Gibco 10566-016) supplemented with MEM-NEAA (Thermo 11140050), sodium pyruvate (Thermo 11360070), HEPES (Thermo 15630080), 2-mercaptoethanol (Gibco 21985023), penicillin/streptomycin (Thermo 15140122) with 10% volume fraction of fetal bovine serum (FBS, VWR #97068-085)), if appropriate.

### Example 16: Methods to Assess PCSK9 Modifying Via a Lentiviral Screen

[0606] Lentiviral plasmids will be produced following standard cloning procedures such that each lentiviral plasmid has one codon optimized NLS bearing CasX molecule (e.g., construct CasX 119 molecule) and an rRNA guide 174 (119.174) with a spacer targeting PCSK9 (spacer sequences in Table 11 or the DNA counterparts of the sequences of SEQ ID NOS: 315-436, 612-2100, or 2286-13861; i.e., T substituted for U bases) with a puromycin selection marker. The cloning is carried out such that the final titer encompasses the full library size by >100× of all possible PCSK9 spacers targeting all known PAMs and their corresponding spacer regions in the PCSK9 gene and regulatory region. If ˜5,000 is the library size; the libraries evaluated would be >5×10⁵.

[0607] Lentiviral particles are produced by transfecting HEK293T at a confluency of 70%-90% using polyethylenimine based transfection of plasmids containing the spacer library, the lentiviral packaging plasmid and the VSV-G envelope plasmids. For particle production, media is changed 12 hr. post-transfection, and virus harvested at 36-48 hr. post-transfection.

[0608] Viral supernatants are filtered using 0.45 μm membrane filters, diluted in FB media if appropriate, and added to target cells, in this case the PCSK9-GFP reporter cell line. Supplement polyberene is added at 5-20 μg/ml to enhance transduction efficiency, if necessary. Transduced cells are selected for 24-48 hr. post-transduction using puromycin at 0.3-3 μg/ml in FB medium, and grown for 7-10 days in FB or other appropriate medium in a 37° C. incubator with 5% CO2.

[0609] Cells are sorted on a SH-100 or MA900 SONY sorter. In this process, cells are gated for the appropriate forward and side scatter, selected for single cells and then gated for reporter expression. Different cell sorting gates are established based on fluorescence level (OFF=full KO, Med=partial disruption or knockdown (KD), High=no edit, Very High=Enhancer) to distinguish between and collect cells editing by i) highly functional PCSK9 disrupting molecules, ii) molecules that only lower expression, and iii) molecules that increase expression. This assay can also be run to identify allele specific guides if two colors are used in human patient cells. Genomic DNA are collected from each group of sorted cells using Quick Extract (Lucigen Cat #QE09050) solution following manufacturer's recommended protocol.

[0610] Spacer libraries from each collected pool are then amplified via PCR directly from the genome and collected for deep sequencing on a Miseq. Analysis of the spacers is done according to gate and abundance for a specific activity; see below for detailed methods for NGS analysis of spacer hits.

[0611] Selected guides from each sorted group are then re-cloned and individually validated in reporter cell line and in primary human cell lines for activity by flow cytometry and T7E1 assay and/or Western blotting, and indel spectrum assessed by NGS analysis. Steps followed may be similar to the description provided under Methods to assess PCSK9 modifying activity in reporter cell line.

### Methods for NGS Analysis of Spacer Hits

[0612] Data coming from above described lentiviral screen will be analyzed using next generation (NGS) sequencing. Spacers are each assessed for ability to disrupt a PCSK9 gene using next generation sequencing (NGS). NGS libraries are generated through specific amplification of the lentiviral backbone containing the spacer. A different library is generated for each of the sorted populations (GFP high, med, low, etc., corresponding to low, med, high PCSK9 expression), and then assessed with the Illumina Hiseq.

[0613] Sequencing reads from the Illumina Hiseq are trimmed for adapter sequences and for regions of low sequencing quality. Paired end reads are merged based on their overlap sequence to form a single consensus sequence per sequenced fragment. Consensus sequences are aligned to the designed spacer sequences using bowtie2. Reads aligning to more than one designed spacer sequence are discarded.

[0614] The ‘abundance’ of each spacer sequence is defined as the number of reads aligning to that sequence. The abundance is tabulated for each sequencing library, forming a count table giving the abundance for each spacer sequence across each of the sequencing libraries (i.e., sorted populations). Finally, the numbers of abundances are then normalized to account for the differing sequencing depth of each library by dividing by the overall read count in that library, multiplied by the mean read count across libraries. The normalized count table is used to determine the activity of each spacer in each gate (high, medium, low, etc.).

[0615] A PCSK9-GFP reporter line will be constructed by knocking in GFP at the endogenous human PCSK9 locus. A reporter (e.g., GFP reporter) coupled to a gRNA targeting sequence, complementary to the gRNA spacer, is integrated into a reporter cell line. Cells are transformed or transfected with a CasX protein and/or sgRNA variant, with the spacer motif of the sgRNA complementary to and targeting the gRNA target sequence of the reporter. The ability of the CasX:sgRNA ribonucleoprotein complex to cleave the target nucleic acid sequence is assayed by FACS. Cells that lose reporter expression indicate occurrence of CasX:sgRNA ribonucleoprotein complex-mediated cleavage and indel formation. The reporting system is based on reduced GFP fluorescence upon successful modifying (editing) of the PCSK9 locus, detected by flow cytometry.

[0616] For screening purposes, the PCSK9 spacers of Table 11 or any one of SEQ ID NOS: 315-436, 612-2100, or 2286-13861 linked to the scaffold of the gNA will be tested. The spacers will be tested with the CasX protein (construct CasX 119 with gNA 174), using SaCas9 and SpyCas9 as controls, in the reporter cell line. The reduction in GFP fluorescence and editing will be evaluated in the PCSK9-GFP reporter cells, selected for successful lipofection using puromycin, and later assayed for GFP disruption via FACS. The CasX 119 and guide 174 are expected to edit at least 5-10% of cells, demonstrating that CasX can modify the endogenous PCSK9 locus, and do so more effectively than the SaCas9 and SpyCas9 system. A T7E1 assay or Western blotting will be performed to assay gene editing in the PCSK9-GFP reporter cell line. CasX 119 and guide 174 with PCSK9 targeting spacers and non-targeting control (NT) will be lipofected into PCSK9-GFP reporter cells, selected for successful lipofection using puromycin, and later assayed for gene editing in the T7E1 assay, demonstrating successful editing of the PCSK9 locus.

### Example 17: Method to Edit the PCSK9 Gene Using CasX Using Lentivirus Construct in an Allele Specific Manner

[0617] Experiments are designed and performed to show the ability of CasX to edit the PCSK9 locus. One strategy to permanently treat a PCSK9 related disorder is to specifically disrupt the mutant copy of the gene while sparing the wild-type (WT) allele. HEK293 cells with both wild-type alleles should be editable by a WT CasX spacer of Table 11 or any one of SEQ ID NOS: 315-436, 612-2100, or 2286-13861, but not by a mutant CasX spacer (e.g., a spacer not having sufficient homology to a WT PCSK9 gene sequence to bind). This example will additionally demonstrate the ability of CasX spacers to distinguish between on-target and off-target alleles that differ by a single nucleotide. HEK293 cells are seeded at 20-40 k cells/well in a 96 well plate in 100 μl of FB medium and cultured in a 37° C. incubator with 5% CO2. The following day, confluence of seeded cells are checked to ensure that cells will be at ˜75% confluence at time of transfection. If cells are at the right confluence, transfection is carried out using the viral supernatants of Example 15 (having CasX 119 and guide 174 with the spacers targeting PCSK9, as above), using 3 wells per construct as replicates. SaCas9 and SpyCas9 targeting PCSK9 are used as benchmarking controls. For each Cas protein type, a non-targeting plasmid is used as a negative control. Cells will be selected for successful transfection with puromycin at 0.3-3 μg/ml for 24-48 hours followed by 24-48 hours of recovery in FB medium. A subset of cells for each sample from the experiment will be lysed, and the genome will be extracted using a Quick extract solution following the manufacturer's protocol. Editing will be analyzed using a T7E1 assay. Briefly, the genomic locus at the targeted edit site is amplified using primers (e.g., a 500 bp region around the intended target) using a PCR program on a thermocycler. The PCR amplicon is then hybridized following a hybridization program on a thermocycler, and then treated with T7 Endonuclease for 30 mins at 37° C. The sample is then analyzed on a 2% agarose gel, or on a Fragment Analyzer to visualize the DNA bands.

### Example 18: Method to Demonstrate Allele-Specific Editing in Autosomal Dominant Hypercholesterolemia (ADH) Patient-Derived Cell Lines

[0618] Cells derived from ADH patients will be obtained and cultured under supplier recommended conditions. Cells will be transfected with a CasX construct (e.g., an RNP of CasX 119 with guide 174 and a PCSK9 spacer of Table 11 or a spacer of SEQ ID NOS: 247-303) using Lipofectamine 3000 following manufacturer's protocol, or nucleofected using Lonza nucleofector kit according to manufacturer's protocol, and seeded in 96 well plates for incubation and growth. Alternatively, CasX constructs may be packaged in a lentivirus as per Example 15, and used to transduce patient-derived cells. Cells will be selected for successful lipofection or nucleofection, or lentiviral transduction, using medium containing puromycin at 0.3-3 μg/ml for 2-4 days or longer, followed by recovery in puromycin-free medium for 2 days or longer. Editing of the PCSK9 locus may be assessed at the genomic, transcriptomic, and proteomic level. At the end of the selection and recovery period, a subset of cells for each sample from the experiment will be lysed, and genome extracted using a Quick extract (QE) solution following the manufacturer's protocol; another subset of cells will be lysed in RIPA cell lysis buffer for proteomic analysis; another subset of cells may be passaged for analysis at a later point in time. A fraction of the QE treated samples will be used to assess editing using a T7E1 assay. Briefly, the genomic locus at the targeted edit site will be amplified using primers (e.g., a 500 bp region around the intended target) using a PCR program on a thermocycler. The PCR amplicon will then be hybridized following a hybridization program on a thermocycler, and then treated with T7 Endonuclease for 30 mins at 37° C. The sample will be then analyzed on a 2% agarose gel, or on a Fragment Analyzer to visualize DNA bands to confirm that the CasX construct can successfully edit the PCSK9 mutation. Another fraction of the QE treated samples will be used to assess editing at the PCSK9 locus using NGS.

[0619] Proteomic analysis will be performed by Western blotting. The samples lysed in RIPA buffer will first be quantified for protein content using a colorimetric protein quantification assay such as BCA (Pierce) or Bradford (BioRad) according to the manufacturer's protocol. Following quantification, the sample will be diluted in beta-mercaptoethanol-supplemented Laemmli buffer to load 2.5-20 μg of total protein per well. Samples will be heat denatured at 95-100° C. for 5-10 minutes, and then cooled to room temperature. Samples will then be loaded onto and run on a polyacrylamide gel. Once the gel has run, proteins will be transferred onto a PVDF membrane, blocked for at least 1 hour at room temperature, and labeled with primary antibodies against PCSK9 and an appropriate loading control. The blot will be washed three times, at five minutes per wash, with PBST (PBS supplemented with 0.1 v/v % Triton X100) on a rocker at room temperature. An appropriate reporter-conjugated secondary antibody will then be used to label the primary antibody for 1 hour at room temperature. The blot will be washed three times, at five minutes per wash, with PBST (PBS supplemented with 0.1 v/v % Triton X100) on a rocker at room temperature. Any necessary substrates will subsequently be added, quenched if required, and imaged on a gel imager. Band intensities will be quantified using appropriate software following manufacturer's protocol.

### Example 19: Method to Deliver PCSK9-Targeting Construct Via AAV: Making and Recovery of AAV with Encoded CasX System

[0620] This example describes a typical protocol followed to produce and characterize AAV vectors packaging CasX molecules and guide

### Materials and Methods:

[0621] For AAV production, the tri-plasmid transfection method is used and requires three essential plasmids—a pTransgene plasmid carrying the PCSK9 gene of interest to be packaged in AAV, pRC, and pHelper plasmids. DNA encoding CasX and guide RNA are cloned into an AAV transgene cassette, between the ITRs to generate the pTransgene plasmid. The constructed transgene plasmid is verified via full-length plasmid sequencing, restriction digestion, and functional tests including in vitro transfection of mammalian cells. Additional plasmids required for AAV production (pRC plasmid and pHelper plasmid) are purchased from commercial suppliers (Aldevron, Takara).

[0622] For AAV production, HEK293 cells are cultured in FB medium in a 37° C. incubator with 5% CO2. 10-40 15 cm dishes of HEK293 cells are used in a single batch of viral production. For a single 15 cm dish, 45-60 μg plasmids are mixed together at 1:1:1 molar ratio together in 4 ml of FB medium, and complexed with Polyethyleneimine (PEI) i.e., at 3 μg PEI/μg of DNA, for 10 mins at room temperature. The ratio of the three plasmids used may be varied to optimize virus production. The PEI-DNA complex is then slowly dripped onto the 15 cm plate of HEK293 cells, and the plate of transfected cells is moved back into the incubator. The next day, the medium may be changed to FB with 2% FBS (instead of 10% FBS, (Fibroblast medium, comprised of: DMEM with Glutamax (Gibco 10566-016) supplemented with MEM-NEAA (Thermo 11140050), sodium pyruvate (Thermo 11360070), HEPES (Thermo 15630080), 2-mercaptoethanol (Gibco 21985023), penicillin/streptomycin (Thermo 15140122) with 10% volume fraction of fetal bovine serum (FBS, VWR #97068-085)), if appropriate). AAV may be harvested from the supernatant, or from the cell pellet, or from a combination of the supernatant and the cell pellet, at any time between 48-120 hours after initial transfection of the plasmids.

[0623] If virus is harvested after 72 hours post-transfection, the media from the cells may be collected at this time to increase virus yields. At 2-5 days post-transfection, the medium and cells are collected. The timing of harvest may be varied to optimize virus yield. The cells are pelleted by centrifugation, and the medium collected from the top. Cells are lysed in a buffer with high salt content and high-salt-active nuclease for 1 h at 37° C. The cells may also be lysed using additional methods, such as sequential freeze-thaw, or chemical lysis by detergent. The medium collected at harvest, and any medium collected at earlier time points, are treated with a 1:5 dilution of a solution containing 40% PEG8000 and 2.5M NaCl, and incubated on ice for 2 h, in order to precipitate AAV. The incubation may also be carried out overnight at 4° C. The AAV precipitate from the medium is pelleted by centrifugation, resuspended in high salt content buffer with high-salt-active nuclease and combined with the lysed cell pellet. The combined cell lysate is then clarified by centrifugation and filtration through a 0.45 μm filter, and purified on an AAV Poros affinity resin column (Thermofisher Scientific). The virus is eluted from the column into a neutralizing solution. At this stage, the virus may be taken through additional rounds of purification to increase the quality of the virus preparation. The eluted virus is then titered via qPCR to quantify the virus yield. For titering, a sample of virus is first digested with DNAse to remove any non-packaged viral DNA, the DNAse deactivated, and then viral capsids disrupted with Proteinase K to expose the packaged viral genomes for titering.

[0624] It is expected that ˜1×10¹² viral genomes will be obtained from one batch of virus produced using the methods as described here.

### Example 20: In Vivo Evaluation of PCSK9 Editing in Mouse Models

[0625] In a first set of experiments, wildtype C57BL/6J mice will be used to test the ability of AAV particles encoding CasX and guide RNA targeted to PCSK9, or XDP comprising RNP of CasX and guide RNA targeted to PCSK9, to edit the mouse PCSK9 gene in vivo. (Carreras et al. BMC Biology 2019 17:4).

### Materials and Methods

[0626] AAV (Table 13, utilizing constructs 3A, 36A, and 37A) encoding CasX 491 and gRNA 174, or XDP packaging RNP of CasX 491 and gRNA 174 (Table 15—pXDP0017, pXDP0001, pGP2, pStx42.174.27.5) constructs targeting the mouse PCSK9 gene using spacer sequence 27.5 (spacer sequence GAGGCTAGAGGACTGAGCCA (SEQ ID NO: 225) for AAV and GAGGCUAGAGGACUGAGCCA (SEQ ID NO: 226) for XDP) will be administered into 10 to 14-week old C57BL/6J mice via tail-vein injections. As experimental controls, AAV or XDP encoding or packaging CasX and gRNA constructs targeting a safe harbor site in the mouse genome, e.g., the mRosa26 locus, will also be administered to control groups. 1 month and 3 months after administration of the respective vectors, cholesterol levels in the blood plasma will be assessed using an enzymatic colorimetric assay, and PCSK9 levels in the blood plasma will be assessed by an ELISA or Western blot assay. A subset of mice will be sacrificed at 1 month and 3 months post-administration of vectors, and tissues will be processed for assessment of PCSK9 gene editing at the genomic, transcriptomic and proteomic levels via NGS, qPCR, and immunohistology. Tissues will also be assessed for off-target editing using established tools for off-target analysis; for example GUIDE-Seq. Additionally, expression of CasX will also be measured across tissues of interest by immunohistology. The results are expected to demonstrate the ability to edit the PCSK9 gene in mice, with a concomitant reduction in cholesterol levels.

TABLE 13
Sequence for AAV constructs
targeting the mouse PCSK9 locus

| Construct | DNA SEQUENCE |
|---|---|
| 3A | (SEQ ID NO: 227) |
| 36A | (SEQ ID NO: 228) |
| 37A | (SEQ ID NO: 229) |

[0627] A transgenic mouse model of hypercholesterolemia with liver-specific expression of human PCSK9 will be used to test the ability of AAV particles encoding CasX and guide RNA, or XDP packaging RNP of CasX and guide RNA targeting human PCSK9, to edit the PCSK9 gene in vivo. (Carreras et al. BMC Biology 2019 17:4).

[0628] AAV (Table 14 with sequences for constructs 3, 36, and 37) encoding CasX 491 and gRNA 174 or XDP packaging RNP of CasX 491 and gRNA 174 constructs (Table 15 with sequences for pXDP0017, pXDP0001, pGP2, pStx42.174.6.8) targeting the human PCSK9 gene (spacer sequence TGGCTTCCTGGTGAAGATGA (SEQ ID NO: 515) for AAV and UGGCUUCCUGGUGAAGAUGA (SEQ ID NO: 559) for XDP) will be administered into 10 to 14-week old transgenic mice via tail-vein injections. As experimental controls, AAV or XDP packaging CasX and gRNA constructs targeting a safe harbor site in the mouse genome, e.g., the mRosa26 locus will be administered. 1 month and 3 months after administration of the respective vectors, cholesterol levels in the blood plasma will be assessed using an enzymatic colorimetric assay, and PCSK9 levels in the blood plasma will be assessed by an ELISA or Western blot assay. A subset of mice will be sacrificed at 1 month and 3 months post-administration of the vectors, and tissues will be processed for assessment of PCSK9 gene editing at the genomic, transcriptomic and proteomic levels via NGS, qPCR, and immunohistology. Tissues will also be assessed for off-target editing using established tools for off-target analysis; for example GUIDE-Seq. Additionally, expression of CasX will also be measured across tissues of interest by immunohistology. The results are expected to demonstrate the ability to edit the human PCSK9 gene in mice, with a concomitant reduction in cholesterol levels.

TABLE 14
Sequence for AAV constructs
targeting the PCSK9 locus

| Construct | DNA SEQUENCE |
|---|---|
| 3 | (SEQ ID NO: 230) |
| 36 | (SEQ ID NO: 231) |
| 37 | (SEQ ID NO: 232) |

TABLE 15
Sequences for XDP constructs targeting
the human PCSK9 locus (spacer 6.8)
and mouse PCSK9 locus (spacer 27.5)

| Construct | DNA SEQUENCE |
|---|---|
| pStx42.174.27.5 | (SEQ ID NO: 25) |
| pStx42.174.6.8 | (SEQ ID NO: 26) |
| pGP2 | (SEQ ID NO: 28) |
| pXDP0017 | (SEQ ID NO: 29) |
| pXDP0001 | (SEQ ID NO: 30) |

### Example 21: Assays Used to Measure sgNA and CasX Protein Activity

[0629] Several assays were used to carry out initial screens of CasX protein and sgNA Deep Mutational Evolution (DME) libraries and modified mutants, and to measure the activity of select protein and sgNA variants relative to CasX reference sgNAs and proteins. E. coli CRISPRi screen:

[0630] Briefly, biological triplicates of dead CasX DME Libraries on a chloramphenicol (CM) resistant plasmid with a GFP gNA on a carbenicillin (Carb) resistant plasmid were transformed (at >5× library size) into MG1655 with genetically integrated and constitutively expressed GFP and RFP. Cells were grown overnight in EZ-RDM+Carb, CM and Anhydrotetracycline (aTc) inducer. E. coli were FACS sorted based on gates for the top 1% of GFP but not RFP repression, collected, and resorted immediately to further enrich for highly functional CasX molecules. Double sorted libraries were then grown out and DNA was collected for deep sequencing on a highseq. This DNA was also re-transformed onto plates and individual clones were picked for further analysis.

E. coli Toxin Selection:

[0631] Briefly carbenicillin resistant plasmid containing an arabinose inducible toxin were transformed into E. coli cells and made electrocompetent. Biological triplicates of CasX DME Libraries with a toxin targeted gNA on a chloramphenicol resistant plasmid were transformed (at >5× library size) into said cells and grown in LB+CM and arabinose inducer. E. coli that cleaved the toxin plasmid survived in the induction media and were grown to mid log and plasmids with functional CasX cleavers were recovered. This selection was repeated as needed. Selected libraries were then grown out and DNA was collected for deep sequencing on a highseq. This DNA was also re-transformed onto plates and individual clones were picked for further analysis and testing.

### Lentiviral Based Screen EGFP Screen:

[0632] Lentiviral particles were produced in HEK293 cells at a confluency of 70%-90% at time of transfection. Cells were transfected using polyethylenimine based transfection of plasmids containing a CasX DME library. Lentiviral vectors were co-transfected with the lentiviral packaging plasmid and the VSV-G envelope plasmids for particle production. Media was changed 12 hours post-transfection, and virus harvested at 36-48 hours post-transfection. Viral supernatants were filtered using 0.45 mm membrane filters, diluted in cell culture media if appropriate, and added to target cells HEK cells with an Integrated GFP reporter. Polybrene was supplemented to enhance transduction efficiency, if necessary. Transduced cells were selected for 24-48 hours post-transduction using puromycin and grown for 7-10 days. Cells were then sorted for GFP disruption & collected for highly functional CasX sgNA or protein variants (see FIG. 19). Libraries were then Amplified via PCR directly from the genome and collected for deep sequencing on a highseq. This DNA could also be re-cloned and re-transformed onto plates and individual clones were picked for further analysis.

### Example 22: Assaying Editing Efficiency of an HEK EGFP Reporter

[0633] To assay the editing efficiency of CasX reference sgNAs and proteins and variants thereof, EGFP HEK293T reporter cells were seeded into 96-well plates and transfected according to the manufacturer's protocol with lipofectamine 3000 (Life Technologies) and 100-200 ng plasmid DNA encoding a reference or CasX variant protein, P2A-puromycin fusion and the reference or variant sgNA. The next day cells were selected with 1.5 μg/ml puromycin for 2 days and analyzed by fluorescence-activated cell sorting (FACS) 7 days after selection to allow for clearance of EGFP protein from the cells. EGFP disruption via editing was traced using an Attune NxT Flow Cytometer and high-throughput autosampler.

### Example 23: Cleavage Efficiency of CasX Reference sgRNA

[0634] The reference CasX sgRNA of SEQ ID NO:4 (below) is described in WO 2018064371 and U.S. Ser. No. 10/570,415B2, the contents of which are incorporated herein by reference:

(SEQ ID NO: 4)
ACAUCUGGCGCGUUUAUUCCAUUACUUUGGAGCCAGUCCCAGCGACUAU
GUCGUAUGGACGAAGCGCUUAUUUAUCGGAGAGAAACCGAUAAGUAAAA
CGCAUCAAAG.

[0635] It was found that alterations to the sgRNA reference sequence of SEQ ID NO:4, producing SEQ ID NO:5 (below) were able to improve CasX cleavage efficiency. The sequence is:

(SEQ ID NO: 5)
UACUGGCGCUUUUAUCUCAUUACUUUGAGAGCCAUCACCAGCGACUAUG
UCGUAUGGGUAAAGCGCUUAUUUAUCGGAGAGAAAUCCGAUAAAUAAGA
AGCAUCAAAG.

[0636] To assay the editing efficiency of CasX reference sgRNAs and variants thereof, EGFP HEK293T reporter cells were seeded into 96-well plates and transfected according to the manufacturer's protocol with lipofectamine 3000 (Life Technologies) and 100-200 ng plasmid DNA encoding a reference CasX protein, P2A-puromycin fusion and the sgRNA. The next day cells were selected with 1.5 μg/ml puromycin for 2 days and analyzed by fluorescence-activated cell sorting (FACS) 7 days after selection to allow for clearance of EGFP protein from the cells. EGFP disruption via editing was traced using an Attune NxT Flow Cytometer and high-throughput autosampler.

[0637] When testing cleavage of an EGFP reporter by CasX reference and sgNA variants, the following spacer target sequences were used: When testing cleavage of an EGFP reporter by CasX reference and sgNA variants, the following spacer target sequences were used: E6 (TGTGGTCGGGGTAGCGGCTG (SEQ ID NO: 17)) and E7 (TCAAGTCCGCCATGCCCGAA (SEQ ID NO: 18)).

[0638] An example of the increased cleavage efficiency of the sgRNA of SEQ ID NO:5 compared to the sgRNA of SEQ ID NO:4 is shown in FIG. 20. Editing efficiency of SEQ ID NO:5 was improved 176% compared to SEQ ID NO: 4. Accordingly, SEQ ID NO: 5 was chosen as reference sgRNA for DME and additional sgNA variant design, described below.

### Example 24: Design, Creation and Evaluation of gNA Variants with Improved Target Cleavage

[0639] Guide nucleic acid (gNA) variants were designed and tested in order to assess improvements in cleavage activity relative to reference gNAs. These guides were discovered via DME or rational design and replacement or addition of guide parts such as the extended stem or the addition of ribozymes at the termini, as described herein.

### Experimental Design:

[0640] All guides were tested In HEK293T or a HEK293T reporter line as follows. Mammalian cells were maintained in a 37° C. incubator, at 5% CO2. HEK293T Human kidney cells and derivatives thereof were grown in Dulbecco's Modified Eagle Medium (DMEM; Corning Cellgro, #10-013-CV) supplemented with 10% fetal bovine serum (FBS; Seradigm, #1500-500), and 100 Units/ml penicillin and 100 mg/ml streptomycin (100×-Pen-Strep; GIBCO #15140-122), and can additionally include sodium pyruvate (100×, Thermofisher #11360070), Non-essential amino acids (100× Thermofisher #11140050), HEPES buffer (100× Thermofisher #15630080), and 2-mercaptoethanol (1000× Thermofisher #21985023). Cells were seeded at 20-30 thousand cells per well into 96-well plates and transfected using 0.25-1 uL of Lipofectamine 3000 (Thermo Fisher Scientific #L3000008), 50-500 ng of a plasmid containing CasX and the reference or variant CasX guide targeting the reporter or target gene following the manufacturer's protocol. 24-72 hours later the media was changed and 0.3-3.0 ug/ml puromycin (Sigma #P8833) was added to select for transformation. 24-96 hours following selection the cells were analyzed by flow cytometry and gated for the appropriate forward and side scatter, selected for single cells and then gated for green fluorescent protein (GFP) or antibody reporter expression (Attune Nxt Flow Cytometer, Thermo Fisher Scientific) to quantify the expression levels of fluorophores. At least 10,000 events were collected for each sample. For the HEK293T-GFP genome editing reporter cell line, flow cytometry was used to quantify the percentage of GFP-negative (edited) cells and the number of cells with GFP disruption for each variant was compared to the reference guide to generate a fold change measurement.

### Results:

[0641] Results from the sgNA variants generated via DME were measured and compared to the reference gNA of SEQ ID NO: 4. These results are presented in FIG. 22, with most variants showing improvements from 0.1 to nearly 1.5-fold compared to the reference gNA. Results of the variants generated via rational design and replacement or addition of guide parts (such as the extended stem or the addition of ribozymes at the termini) are shown in FIGS. 21 and 23 respectively; again showing improvements with many of the constructs. The additions to the variants, along with their encoding sequences, portrayed by number in FIG. 23 are listed in Table 16, below. We observed that single mutations such as the C18G mutation improve guide activity when compared to the reference. Additionally, rationally swapping in different stem loops for the extended stem loop, such as MS2, QB, PP7, UvsX, etc. improved activity when compared to the reference guide, as does truncating the original extended stem loop. Finally, we demonstrate that while most ribozymes disrupt activity, the addition of a 3′ HDV to the reference guide RNA can improve activity up to 20-50%.

TABLE 16
Extensions added to 3′ and 5′ ends of gNA

| Extension | | |
|---|---|---|
| Number | Extension Name | Extension Encoding Sequence |
| 1 | HDV antigenomic | GGGTCGGCATGGCATCTCCACCTCCTCGCGGTCCGACCTGGGC |
| | ribozyme | ATCCGAAGGAGGACGCACGTCCACTCGGATGGCTAAGGGAGAG |
| | | CCA (SEQ ID NO: 598) |
| 2 | HDV genomic | GGCCGGCATGGTCCCAGCCTCCTCGCTGGCGCCGGCTGGGCAA |
| | ribozyme | CATTCCGAGGGGACCGTCCCCTCGGTAATGGCGAATGGGACCC |
| | | (SEQ ID NO: 599) |
| 3 | HDV ribozyme | GATGGCCGGCATGGTCCCAGCCTCCTCGCTGGCGCCGGCTGGG |
| | (v1) | CAACACCTTCGGGTGGCGAATGGGAC (SEQ ID NO: 600) |
| 4 | HDV ribozyme | TTTTGGCCGGCATGGTCCCAGCCTCCTCGCTGGCGCCGGCTGG |
| | (v2) | GCAACATGCTTCGGCATGGCGAATGGGACCCCGGG (SEQ ID |
| | | NO: 601) |
| 5 | Hatchet | CATTCCTCAGAAAATGACAAACCTGTGGGGCGTAAGTAGATCT |
| | | TCGGATCTATGATCGTGCAGACGTTAAAATCAGGT (SQE ID |
| | | NO: 602) |
| 6 | env25 pistol | CGTGGTTAGGGCCACGTTAAATAGTTGCTTAAGCCCTAAGCGT |
| | ribozyme (with | TGATCTTCGGATCAGGTGCAA (SEQ ID NO: 603) |
| | CUUCGGloop) | |
| 7 | HH15 Minimal | GGGAGCCCCGCTGATGAGGTCGGGGAGACCGAAAGGGACTTCG |
| | Hammerhead | GTCCCTACGGGGCTCCC (SEQ ID NO: 604) |
| | ribozyme | |
| 8 | sTRSV WT viral | CCTGTCACCGGATGTGCTTTCCGGTCTGATGAGTCCGTGAGGA |
| | Hammerhead | CGAAACAGG (SEQ ID NO: 605) |
| | ribozyme | |
| 9 | Hammerhead | CGACTACTGATGAGTCCGTGAGGACGAAACGAGTAAGCTCGTC |
| | ribozyme | TAGTCGCGTGTAGCGAAGCA (SEQ ID NO: 606) |
| 10 | Hammerhead | CGACTACTGATGAGTCCGTGAGGACGAAACGAGTAAGCTCGTC |
| | ribozyme, | TAGTCG (SEQ ID NO: 607) |
| | smaller scar | |
| 11 | Hammerhead | CCAGTACTGATGAGTCCGTGAGGACGAAACGAGTAAGCTCGTC |
| | ribozyme, guide | TACTGGCGCTTTTATCTCAT (SEQ ID NO: 608) |
| | scaffold scar | |
| 12 | Twisted | ACCCGCAAGGCCGACGGCATCCGCCGCCGCTGGTGCAAGTCCA |
| | Sister 1 | GCCGCCCCTTCGGGGGCGGGCGCTCATGGGTAAC (SEQ ID |
| | | NO: 609) |
| 13 | Env-9 Twister | GGCAATAAAGCGGTTACAAGCCCGCAAAAATAGCAGAGTAATG |
| | | TCGCGATAGCGCGGCATTAATGCAGCTTTATTG (SEQ ID |
| | | NO: 610) |
| 14 | RBMX recruiting | CCACCCCCACCACCACCCCCACCCCCACCACCACCC (SEQ |
| | motif | ID NO: 611) |

[0642] The results support the conclusion that DME and rational design can be used to improve the performance of the gNAs and that many of these variant RNAs can now be used with the targeting sequences as a component of the CasX:gNA systems described herein to edit target nucleic acid sequences.

### Example 25: CasX Molecule 119 and Guide Scaffold 174 Edits PCSK9 Locus in HEK293T Cells

[0643] The purpose of the experiments was to demonstrate editing of the PCSK9 locus in HEK293T cells using constructs of CasX 119, guide 174 and spacers targeting the WT sequence, when delivered by plasmid transfection.

### Materials and Methods:

[0644] Spacers targeting PCSK9 were chosen manually based on PAM availability without prior knowledge of activity (sequences in Table 11). HEK293T cells were seeded at 20-40 k cells/well in a 96 well plate in 100 μl of FB medium and cultured in a 37° C. incubator with 5% CO2. The following day, confluence of seeded cells was checked to ensure that cells were at ˜75% confluence at time of transfection. If cells were at the right confluence, transfection was carried out. Each CasX and guide construct (e.g., see Table 5 for sequence of CasX 119; see Table 2 for sequence of guide 174; and see Table 11 for PCSK9 spacer sequences) was transfected into the HEK293T cells at 100-500 ng per well using Lipofectamine 3000 following the manufacturer's protocol, using 3 wells per construct as replicates. SaCas9 and SpyCas9 targeting PCSK9 were used as benchmarking controls. For each Cas protein type, a non-targeting plasmid was used as a negative control. Cells were selected for successful transfection with puromycin at 0.3-3 μg/ml for 24-48 hours, followed by 24-96 hours of recovery in FB medium. Cells for each sample from the experiment was lysed, and the genome was extracted following the manufacturer's protocol and standard practices. Editing in cells from each experimental sample were assayed using NGS analysis. Briefly, genomic DNA was amplified via PCR with primers specific to the target genomic location of interest to form a target amplicon. These primers contain additional sequence at the 5′ ends to introduce Illumina reads 1 and 2 sequences. Further, they contain a 16 nt random sequence that functions as a unique molecular identifier (UMI). Quality and quantification of the amplicon was assessed using a Fragment Analyzer DNA analyzer kit (Agilent, dsDNA 35-1500 bp). Amplicons were sequenced on the Illumina Miseq according to the manufacturer's instructions. Raw fastq files from sequencing were processed as follows: (1) the sequences were trimmed for quality and for adapter sequences using the program cutadapt (v. 2.1); (2) the sequences from read 1 and read 2 were merged into a single insert sequence using the program flash2 (v2.2.00); (3) the consensus insert sequences were run through the program CRISPResso2 (v 2.0.29), along with the expected amplicon sequence and the spacer sequence. This program quantifies the percent of reads that were modified in a window around the 3′ end of the spacer (30 bp window centered at −3 bp from 3′ end of spacer). The activity of the CasX molecule was quantified as the total percent of reads that contain insertions and/or deletions anywhere within this window.

### Results:

[0645] The graph of FIG. 24 shows that constructs utilizing ten different spacers targeted to PCSK9 were able to edit the PCSK9 locus with varying levels of activity, at an average editing of 70%. Each data point is an average measurement of NGS reads of editing outcomes generated by an individual spacer. These results demonstrate that, under the conditions of the assay, CasX with appropriate guides were able to edit the PCSK9 locus, and did so to a greater degree compared to Spy Cas9 (based on mean editing), while exhibiting considerably more editing than Sau Cas9.

### Example 26: CasX 119 and Guide Scaffold 174 Edits the PCSK9 Locus in HepG2 Cells

[0646] Experiments were conducted to demonstrate the ability to edit the PCSK9 locus in HepG2 cells using constructs of CasX 119, guide 174 and spacers targeting the WT PCSK9 sequence delivered by lentivirus.

### Materials and Methods:

[0647] Lentiviral particles were produced using the methods of Example 15 by transfecting HEK293T at a confluency of 70%-90% using polyethylenimine-based transfection of CasX plasmids containing spacers targeting the PCSK9 locus (sequences 6.7, 6.8, and 6.9 of Table 11), the lentiviral packaging plasmid and the VSV-G envelope plasmids. For particle production, media was changed 12 hr. post-transfection, and virus harvested at 36-48 hours post-transfection. Viral supernatants were filtered using 0.45 μm membrane filters, diluted in media if appropriate, and added to HepG2 target cells cultured in HepG2 medium (EMEM with 10% FBS and 1% penicillin-streptomycin). Supplemental polyberene was added at 5-20 μg/ml to enhance transduction efficiency, if necessary. Transduced cells were selected 24-48 hours post-transduction using puromycin at 0.3-3 μg/ml in HepG2 medium, and grown for 6 days in HepG2 medium in a 37° C. incubator with 5% CO2. Cells were then harvested, and editing was analyzed using NGS. Briefly, genomic DNA was amplified via PCR with primers specific to the target genomic location of interest to form a target amplicon. These primers contained additional sequence at the 5′ ends to introduce Illumina reads 1 and 2 sequences. Further, they contained a 16 nt random sequence that functioned as a unique molecular identifier (UMI). The quality and quantification of the amplicon was assessed using a Fragment Analyzer DNA analyzer kit (Agilent, dsDNA 35-1500 bp). Amplicons were sequenced on the Illumina Miseq according to the manufacturer's instructions. Raw fastq files from sequencing were processed as follows: (1) the sequences were trimmed for quality and for adapter sequences using the program cutadapt (v. 2.1); (2) the sequences from read 1 and read 2 were merged into a single insert sequence using the program flash2 (v2.2.00); and (3) the consensus insert sequences were run through the program CRISPResso2 (v 2.0.29), along with the expected amplicon sequence and the spacer sequence. This program quantifies the percent of reads that were modified in a window around the 3′ end of the spacer (30 bp window centered at −3 bp from 3′ end of spacer). The editing activity of the CasX molecule was quantified as the total percent of reads that contained insertions and/or deletions anywhere within this window.

### Results:

[0648] The graph of FIG. 25 shows that constructs with three different spacers targeted to PCSK9 were able to edit the PCSK9 locus with varying levels of activity, at an average editing of 60%. Each data point is an average measurement of NGS reads of editing outcomes generated by an individual spacer.

[0649] The results demonstrate that, under the conditions of the assay, CasX with appropriately targeted guides were able to edit the PCSK9 locus in HepG2 cells with a high degree of efficiency.

### Example 27: CasX 491 and Guide Scaffold 174 Edits the PCSK9 Locus in AML12 Cells

[0650] Experiments were conducted to demonstrate the ability to edit the wild-type PCSK9 locus in AML12 cells when delivered by transfection.

### Materials and Methods:

[0651] Murine hepatocyte cell line AML12 cells were transfected with 1000 ng of plasmid encoding CasX 491 along with gRNA scaffold 174 with spacers 27.1 to 27.7, targeting wild-type murine PCSK9 (sequence in Table 17). Transfected cells are grown for 6 days in AML12 medium (DMEM:F12 supplemented with 10% fetal bovine serum, 10 μg/ml insulin, 5.5 μg/ml transferrin, 5 ng/ml selenium, 40 ng/ml dexamethasone) incubated at 37° C. incubator with 5% CO2. Cells were then harvested and editing analyzed using NGS. Briefly, genomic DNA was amplified via PCR with primers specific to the target genomic location of interest to form a target amplicon. These primers contain additional sequence at the 5′ ends to introduce Illumina read 1 and 2 sequences. Further, contain a 16 nt random sequence that functions as a unique molecular identifier (UMI). Quality and quantification of the amplicon was assessed using a Fragment Analyzer DNA analyzer kit (Agilent, dsDNA 35-1500 bp). Amplicons were sequenced on the Illumina Miseq according to the manufacturer's instructions. Raw fastq files from sequencing were processed as follows: (1) the sequences were trimmed for quality and for adapter sequences using the program cutadapt (v. 2.1); (2) the sequences from read 1 and read 2 were merged into a single insert sequence using the program flash2 (v2.2.00); and (3) the consensus insert sequences were run through the program CRISPResso2 (v 2.0.29), along with the expected amplicon sequence and the spacer sequence. This program quantifies the percent of reads that were modified in a window around the 3′ end of the spacer (30 bp window centered at −3 bp from 3′ end of spacer). The activity of the CasX molecule was quantified as the total percent of reads that contain insertions and/or deletions anywhere within this window.

TABLE 17
Spacer sequences targeting mouse PCSK9 genetic locus

| | | | DNA | | RNA |
|---|---|---|---|---|---|
| | | | SEQ | | SEQ |
| Spacer | PAM | Spacer DNA Sequence | ID NO: | Spacer RNA Sequence | ID NO: |
| 27.1 | TTC | GCCTCGCCCTCCCCAGACAG | 233 | GCCUCGCCCUCCCCAGACAG | 240 |
| 27.2 | TTC | GATGGGGCTCGGGGTGGCGT | 234 | GAUGGGGCUCGGGGUGGCGU | 241 |
| 27.3 | TTC | GGGGTGTGGGTACTGGACGC | 235 | GGGGUGUGGGUACUGGACGC | 242 |
| 27.4 | TTC | CGTGGACGCGCAGGCTGCCG | 236 | CGUGGACGCGCAGGCUGCCG | 243 |
| 27.5 | TTC | GAGGCTAGAGGACTGAGCCA | 237 | GAGGCUAGAGGACUGAGCCA | 244 |
| 27.6 | TTC | CGAGGCCGCGCGCACCTCTC | 238 | CGAGGCCGCGCGCACCUCUC | 245 |
| 27.7 | TTC | TAATCTCCATCCTCGTCCTG | 239 | UAAUCUCCAUCCUCGUCCUG | 246 |

### Results:

[0652] The graph of FIG. 26 shows that constructs with three different spacers were able to edit the PCSK9 locus with at an average editing of at least 6-7%, with other spacers resulting in lower amounts of editing. Each data point is an average measurement of NGS reads of editing outcomes generated by an individual spacer. The results demonstrate that, under the conditions of the assay, CasX with appropriately targeted guides were able to edit the PCSK9 locus in AML12 cells.

The application's sequence listing, which the Patent Office published only in electronic form, follows.

SEQUENCE LISTING (13864 sequences)

SEQ ID NO: 1 - protein, 986 aa, Unknown
  Deltaproteobacteria sp.
MEKRINKIRKKLSADNATKPVSRSGPMKTLLVRVMTDDLKKRLEKRRKKPEVMPQVISNNAANNLRMLLDDYTKMKEAILQVYWQEFKDDHVGLMCKFAQPASKKIDQNKLKPEMDEKGNLTTAGFACSQCGQPLFVYKLEQVSEKGKAYTNYFGRCNVAEHEKLILLAQLKPEKDSDEAVTYSLGKFGQRALDFYSIHVTKESTHPVKPLAQIAGNRYASGPVGKALSDACMGTIASFLSKYQDIIIEHQKVVKGNQKRLESLRELAGKENLEYPSVTLPPQPHTKEGVDAYNEVIARVRMWVNLNLWQKLKLSRDDAKPLLRLKGFPSFPVVERRENEVDWWNTINEVKKLIDAKRDMGRVFWSGVTAEKRNTILEGYNYLPNENDHKKREGSLENPKKPAKRQFGDLLLYLEKKYAGDWGKVFDEAWERIDKKIAGLTSHIEREEARNAEDAQSKAVLTDWLRAKASFVLERLKEMDEKEFYACEIQLQKWYGDLRGNPFAVEAENRVVDISGFSIGSDGHSIQYRNLLAWKYLENGKREFYLLMNYGKKGRIRFTDGTDIKKSGKWQGLLYGGGKAKVIDLTFDPDDEQLIILPLAFGTRQGREFIWNDLLSLETGLIKLANGRVIEKTIYNKKIGRDEPALFVALTFERREVVDPSNIKPVNLIGVDRGENIPAVIALTDPEGCPLPEFKDSSGGPTDILRIGEGYKEKQRAIQAAKEVEQRRAGGYSRKFASKSRNLADDMVRNSARDLFYHAVTHDAVLVFENLSRGFGRQGKRTFMTERQYTKMEDWLTAKLAYEGLTSKTYLSKTLAQYTSKTCSNCGFTITTADYDGMLVRLKKTSDGWATTLNNKELKAEGQITYYNRYKRQTVEKELSAELDRLSEESGNNDISKWTKGRRDEALFLLKKRFSHRPVQEQFVCLDCGHEVHADEQAALNIARSWLFLNSNSTEFKSYKSGKQPFVGAWQAFYKRRLKEVWKPNA

SEQ ID NO: 2 - protein, 978 aa, Unknown
  Planctomycetes sp.
MQEIKRINKIRRRLVKDSNTKKAGKTGPMKTLLVRVMTPDLRERLENLRKKPENIPQPISNTSRANLNKLLTDYTEMKKAILHVYWEEFQKDPVGLMSRVAQPAPKNIDQRKLIPVKDGNERLTSSGFACSQCCQPLYVYKLEQVNDKGKPHTNYFGRCNVSEHERLILLSPHKPEANDELVTYSLGKFGQRALDFYSIHVTRESNHPVKPLEQIGGNSCASGPVGKALSDACMGAVASFLTKYQDIILEHQKVIKKNEKRLANLKDIASANGLAFPKITLPPQPHTKEGIEAYNNVVAQIVIWVNLNLWQKLKIGRDEAKPLQRLKGFPSFPLVERQANEVDWWDMVCNVKKLINEKKEDGKVFWQNLAGYKRQEALLPYLSSEEDRKKGKKFARYQFGDLLLHLEKKHGEDWGKVYDEAWERIDKKVEGLSKHIKLEEERRSEDAQSKAALTDWLRAKASFVIEGLKEADKDEFCRCELKLQKWYGDLRGKPFAIEAENSILDISGFSKQYNCAFIWQKDGVKKLNLYLIINYFKGGKLRFKKIKPEAFEANRFYTVINKKSGEIVPMEVNFNFDDPNLIILPLAFGKRQGREFIWNDLLSLETGSLKLANGRVIEKTLYNRRTRQDEPALFVALTFERREVLDSSNIKPMNLIGIDRGENIPAVIALTDPEGCPLSRFKDSLGNPTHILRIGESYKEKQRTIQAAKEVEQRRAGGYSRKYASKAKNLADDMVRNTARDLLYYAVTQDAMLIFENLSRGFGRQGKRTFMAERQYTRMEDWLTAKLAYEGLPSKTYLSKTLAQYTSKTCSNCGFTITSADYDRVLEKLKKTATGWMTTINGKELKVEGQITYYNRYKRQNVVKDLSVELDRLSEESVNNDISSWTKGRSGEALSLLKKRFSHRPVQEKFVCLNCGFETHADEQAALNIARSWLFLRSQEYKKYQTNKTTGNTDKRAFVETWQSFYRKKLKEVWKPAV

SEQ ID NO: 3 - protein, 855 aa, Unknown
  Candidatus Sungbacteria sp.
MDNANKPSTKSLVNTTRISDHFGVTPGQVTRVFSFGIIPTKRQYAIIERWFAAVEAARERLYGMLYAHFQENPPAYLKEKFSYETFFKGRPVLNGLRDIDPTIMTSAVFTALRHKAEGAMAAFHTNHRRLFEEARKKMREYAECLKANEALLRGAADIDWDKIVNALRTRLNTCLAPEYDAVIADFGALCAFRALIAETNALKGAYNHALNQMLPALVKVDEPEEAEESPRLRFFNGRINDLPKFPVAERETPPDTETIIRQLEDMARVIPDTAEILGYIHRIRHKAARRKPGSAVPLPQRVALYCAIRMERNPEEDPSTVAGHFLGEIDRVCEKRRQGLVRTPFDSQIRARYMDIISFRATLAHPDRWTEIQFLRSNAASRRVRAETISAPFEGFSWTSNRTNPAPQYGMALAKDANAPADAPELCICLSPSSAAFSVREKGGDLIYMRPTGGRRGKDNPGKEITWVPGSFDEYPASGVALKLRLYFGRSQARRMLTNKTWGLLSDNPRVFAANAELVGKKRNPQDRWKLFFHMVISGPPPVEYLDFSSDVRSRARTVIGINRGEVNPLAYAVVSVEDGQVLEEGLLGKKEYIDQLIETRRRISEYQSREQTPPRDLRQRVRHLQDTVLGSARAKIHSLIAFWKGILAIERLDDQFHGREQKIIPKKTYLANKTGFMNALSFSGAVRVDKKGNPWGGMIEIYPGGISRTCTQCGTVWLARRPKNPGHRDAMVVIPDIVDDAAATGFDNVDCDAGTVDYGELFTLSREWVRLTPRYSRVMRGTLGDLERAIRQGDDRKSRQMLELALEPQPQWGQFFCHRCGFNGQSDVLAATNLARRAISLIRRLPDTDTPPTP

SEQ ID NO: 4 - RNA, 108 nt, Artificial Sequence
  gRNA sequence
acaucuggcgcguuuauuccauuacuuuggagccagucccagcgacuaugucguauggacgaagcgcuuauuuaucggagagaaaccgauaaguaaaacgcaucaaag

SEQ ID NO: 5 - RNA, 108 nt, Artificial Sequence
  gRNA sequence
uacuggcgcuuuuaucucauuacuuugagagccaucaccagcgacuaugucguauggguaaagcgcuuauuuaucggagagaaauccgauaaauaagaagcaucaaag

SEQ ID NO: 6 - RNA, 81 nt, Artificial Sequence
  gRNA sequence
acaucuggcgcguuuauuccauuacuuuggagccagucccagcgacuaugucguauggacgaagcgcuuauuuaucggaga

SEQ ID NO: 7 - RNA, 78 nt, Artificial Sequence
  gRNA sequence
acaucuggcgcguuuauuccauuacuuuggagccagucccagcgacuaugucguauggacgaagcgcuuauuuaucgg

SEQ ID NO: 8 - RNA, 80 nt, Artificial Sequence
  gRNA sequence
uacuggcgcuuuuaucucauuacuuugagagccaucaccagcgacuaugucguauggguaaagcgcuuauuuaucggaga

SEQ ID NO: 9 - RNA, 77 nt, Artificial Sequence
  gRNA sequence
uacuggcgcuuuuaucucauuacuuugagagccaucaccagcgacuaugucguauggguaaagcgcuuauuuaucgg

SEQ ID NO: 10 - RNA, 25 nt, Artificial Sequence
  gRNA sequence
guuuacacacucccucucauagggu

SEQ ID NO: 11 - RNA, 25 nt, Artificial Sequence
  gRNA sequence
guuuacacacucccucucaugaggu

SEQ ID NO: 12 - RNA, 25 nt, Artificial Sequence
  gRNA sequence
uuuuacauacccccucucaugggau

SEQ ID NO: 13 - RNA, 25 nt, Artificial Sequence
  gRNA sequence
guuuacacacucccucucauggggg

SEQ ID NO: 14 - RNA, 20 nt, Artificial Sequence
  gRNA sequence
ccagcgacuaugucguaugg

SEQ ID NO: 15 - RNA, 39 nt, Artificial Sequence
  gRNA sequence
gcgcuuauuuaucggagagaaauccgauaaauaagaagc

SEQ ID NO: 16 - RNA, 74 nt, Artificial Sequence
  gRNA sequence
ggcgcuuuuaucucauuacuuugagagccaucaccagcgacuaugucguauggguaaagcgcuuauuuaucgga

SEQ ID NO: 17 - DNA, 20 bp, Artificial Sequence
  spacer target sequence
tgtggtcggggtagcggctg

SEQ ID NO: 18 - DNA, 20 bp, Artificial Sequence
  spacer target sequence
tcaagtccgccatgcccgaa

SEQ ID NO: 19 - RNA, 21 nt, Artificial Sequence
  stem loop sequence
  misc_feature (4)..(18): n is any ribonucleotide
  misc_feature (8)..(18): These individual nucleotides may be absent
uuunnnnnnnnnnnnnnnuuu

SEQ ID NO: 20 - RNA, 20 nt, Artificial Sequence
  scaffold stem loop
ccagcgacuaugucguaugg

SEQ ID NO: 21 - RNA, 39 nt, Artificial Sequence; identical to SEQ ID NO: 15
  extended stem loop

SEQ ID NO: 22 - RNA, 81 nt, Unknown; identical to SEQ ID NO: 6
  Deltaproteobacter sp.

SEQ ID NO: 23 - RNA, 78 nt, Unknown; identical to SEQ ID NO: 7
  Deltaproteobacter sp.

SEQ ID NO: 24 - RNA, 23 nt, Unknown
  Deltaproteobacter sp.
ccgauaaguaaaacgcaucaaag

SEQ ID NO: 25 - DNA, 2413 bp, Artificial Sequence
  pStx42.174.27.5 plasmid sequence
ttcggggaaatgtgcgcggaacccctatttgtttatttttctaaatacattcaaatatgtatccgctcatgagacaataaccctgataaatgcttcaataatattgaaaaaggaagagtatgagtattcaacatttccgtgtcgcccttattcccttttttgcggcattttgccttcctgtttttgctcacccagaaacgctggtgaaagtaaaagatgctgaagatcagttgggtgcacgagtgggttacatcgaactggatctcaacagcggtaagatccttgagagttttcgccccgaagaacgttttccaatgatgagcacttttaaagttctgctatgtggcgcggtattatcccgtattgacgccgggcaagagcaactcggtcgccgcatacactattctcagaatgacttggttgagtactcaccagtcacagaaaagcatcttacggatggcatgacagtaagagaattatgcagtgctgccataaccatgagtgataacactgcggccaacttacttctgacaacgatcggaggaccgaaggagctaaccgcttttttgcacaacatgggggatcatgtaactcgccttgatcgttgggaaccggagctgaatgaagccataccaaacgacgagcgtgacaccacgatgcctgtagcaatggcaacaacgttgcgcaaactattaactggcgaactacttactctagcttcccggcaacaattaatagactggatggaggcggataaagttgcaggaccacttctgcgctcggcccttccggctggctggtttattgctgataaatctggagccggtgagcgtgggtctcgcggtatcattgcagcactggggccagatggtaagccctcccgtatcgtagttatctacacgacggggagtcaggcaactatggatgaacgaaatagacagatcgctgagataggtgcctcactgattaagcattggtaactgtcagaccaagtttactcatatatactttagattgatttaaaacttcatttttaatttaaaaggatctaggtgaagatcctttttgataatctcatgaccaaaatcccttaacgtgagttttcgttccactgagcgtcagaccccgtagaaaagatcaaaggatcttcttgagatcctttttttctgcgcgtaatctgctgcttgcaaacaaaaaaaccaccgctaccagcggtggtttgtttgccggatcaagagctaccaactctttttccgaaggtaactggcttcagcagagcgcagataccaaatactgttcttctagtgtagccgtagttaggccaccacttcaagaactctgtagcaccgcctacatacctcgctctgctaatcctgttaccagtggctgctgccagtggcgataagtcgtgtcttaccgggttggactcaagacgatagttaccggataaggcgcagcggtcgggctgaacggggggttcgtgcacacagcccagcttggagcgaacgacctacaccgaactgagatacctacagcgtgagctatgagaaagcgccacgcttcccgaagggagaaaggcggacaggtatccggtaagcggcagggtcggaacaggagagcgcacgagggagcttccagggggaaacgcctggtatctttatagtcctgtcgggtttcgccacctctgacttgagcgtcgatttttgtgatgctcgtcaggggggcggagcctatggaaaaacgccagcaacgcggcctttttacggttcccgacaggcccgaaggaatagaagaagaaggtggagagagagacagagacagatccattcgattagtgaacggatctcgacggtatcgcctttaaaagaaaaggggggattggggggtacagtgcaggggaaagaatagtagacataatagcaacagacatacaaactaaagaattacaaaaacaaattacaaaaattcaaaattttcgggtttattacagggacagcagagatccagtttgagggcctatttcccatgattccttcatatttgcatatacgatacaaggctgttagagagataattggaattaatttgactgtaaacacaaagatattagtacaaaatacgtgacgtagaaagtaataatttcttgggtagtttgcagttttaaaattatgttttaaaatggactatcatatgcttaccgtaacttgaaagtatttcgatttcttggctttatatatcttgtggaaaggacgaaacaccactggcgcttttatctgattactttgagagccatcaccagcgactatgtcgtagtgggtaaagctccctcttcggagggagcatcaaaggaggctagaggactgagccattttttttgaattcgctagctaggtctagacgtcaggtggcactt

SEQ ID NO: 26 - DNA, 2413 bp, Artificial Sequence
  pStx42.174.6.8 plasmid sequence
ttcggggaaatgtgcgcggaacccctatttgtttatttttctaaatacattcaaatatgtatccgctcatgagacaataaccctgataaatgcttcaataatattgaaaaaggaagagtatgagtattcaacatttccgtgtcgcccttattcccttttttgcggcattttgccttcctgtttttgctcacccagaaacgctggtgaaagtaaaagatgctgaagatcagttgggtgcacgagtgggttacatcgaactggatctcaacagcggtaagatccttgagagttttcgccccgaagaacgttttccaatgatgagcacttttaaagttctgctatgtggcgcggtattatcccgtattgacgccgggcaagagcaactcggtcgccgcatacactattctcagaatgacttggttgagtactcaccagtcacagaaaagcatcttacggatggcatgacagtaagagaattatgcagtgctgccataaccatgagtgataacactgcggccaacttacttctgacaacgatcggaggaccgaaggagctaaccgcttttttgcacaacatgggggatcatgtaactcgccttgatcgttgggaaccggagctgaatgaagccataccaaacgacgagcgtgacaccacgatgcctgtagcaatggcaacaacgttgcgcaaactattaactggcgaactacttactctagcttcccggcaacaattaatagactggatggaggcggataaagttgcaggaccacttctgcgctcggcccttccggctggctggtttattgctgataaatctggagccggtgagcgtgggtctcgcggtatcattgcagcactggggccagatggtaagccctcccgtatcgtagttatctacacgacggggagtcaggcaactatggatgaacgaaatagacagatcgctgagataggtgcctcactgattaagcattggtaactgtcagaccaagtttactcatatatactttagattgatttaaaacttcatttttaatttaaaaggatctaggtgaagatcctttttgataatctcatgaccaaaatcccttaacgtgagttttcgttccactgagcgtcagaccccgtagaaaagatcaaaggatcttcttgagatcctttttttctgcgcgtaatctgctgcttgcaaacaaaaaaaccaccgctaccagcggtggtttgtttgccggatcaagagctaccaactctttttccgaaggtaactggcttcagcagagcgcagataccaaatactgttcttctagtgtagccgtagttaggccaccacttcaagaactctgtagcaccgcctacatacctcgctctgctaatcctgttaccagtggctgctgccagtggcgataagtcgtgtcttaccgggttggactcaagacgatagttaccggataaggcgcagcggtcgggctgaacggggggttcgtgcacacagcccagcttggagcgaacgacctacaccgaactgagatacctacagcgtgagctatgagaaagcgccacgcttcccgaagggagaaaggcggacaggtatccggtaagcggcagggtcggaacaggagagcgcacgagggagcttccagggggaaacgcctggtatctttatagtcctgtcgggtttcgccacctctgacttgagcgtcgatttttgtgatgctcgtcaggggggcggagcctatggaaaaacgccagcaacgcggcctttttacggttcccgacaggcccgaaggaatagaagaagaaggtggagagagagacagagacagatccattcgattagtgaacggatctcgacggtatcgcctttaaaagaaaaggggggattggggggtacagtgcaggggaaagaatagtagacataatagcaacagacatacaaactaaagaattacaaaaacaaattacaaaaattcaaaattttcgggtttattacagggacagcagagatccagtttgagggcctatttcccatgattccttcatatttgcatatacgatacaaggctgttagagagataattggaattaatttgactgtaaacacaaagatattagtacaaaatacgtgacgtagaaagtaataatttcttgggtagtttgcagttttaaaattatgttttaaaatggactatcatatgcttaccgtaacttgaaagtatttcgatttcttggctttatatatcttgtggaaaggacgaaacaccactggcgcttttatctgattactttgagagccatcaccagcgactatgtcgtagtgggtaaagctccctcttcggagggagcatcaaagtggcttcctggtgaagatgattttttttgaattcgctagctaggtctagacgtcaggtggcactt

SEQ ID NO: 27 - RNA, 26 nt, Unknown
  Planctomycetes sp.
ucuccgauaaauaagaagcaucaaag

SEQ ID NO: 28 - DNA, 1536 bp, Artificial Sequence
  pGP2 plasmid sequence
atgaagtgccttttgtacttagcctttttattcattggggtgaattgcaagttcaccatagtttttccacacaaccaaaaaggaaactggaaaaatgttccttctaattaccattattgcccgtcaagctcagatttaaattggcataatgacttaataggcacagccttacaagtcaaaatgcccaagagtcacaaggctattcaagcagacggttggatgtgtcatgcttccaaatgggtcactacttgtgatttccgctggtatggaccgaagtatataacacattccatccgatccttcactccatctgtagaacaatgcaaggaaagcattgaacaaacgaaacaaggaacttggctgaatccaggcttccctcctcaaagttgtggatatgcaactgtgacggatgccgaagcagtgattgtccaggtgactcctcaccatgtgctggttgatgaatacacaggagaatgggttgattcacagttcatcaacggaaaatgcagcaattacatatgccccactgtccataactctacaacctggcattctgactataaggtcaaagggctatgtgattctaacctcatttccatggacatcaccttcttctcagaggacggagagctatcatccctgggaaaggagggcacagggttcagaagtaactactttgcttatgaaactggaggcaaggcctgcaaaatgcaatactgcaagcattggggagtcagactcccatcaggtgtctggttcgagatggctgataaggatctctttgctgcagccagattccctgaatgcccagaagggtcaagtatctctgctccatctcagacctcagtggatgtaagtctaattcaggacgttgagaggatcttggattattccctctgccaagaaacctggagcaaaatcagagcgggtcttccaatctctccagtggatctcagctatcttgctcctaaaaacccaggaaccggtcctgctttcaccataatcaatggtaccctaaaatactttgagaccagatacatcagagtcgatattgctgctccaatcctctcaagaatggtcggaatgatcagtggaactaccacagaaagggaactgtgggatgactgggcaccatatgaagacgtggaaattggacccaatggagttctgaggaccagttcaggatataagtttcctttatacatgattggacatggtatgttggactccgatcttcatcttagctcaaaggctcaggtgttcgaacatcctcacattcaagacgctgcttcgcaacttcctgatgatgagagtttattttttggtgatactgggctatccaaaaatccaatcgagcttgtagaaggttggttcagtagttggaaaagctctattgcctcttttttctttatcatagggttaatcattggactattcttggttctccgagttggtatccatctttgcattaaattaaagcacaccaagaaaagacagatttatacagacatagagatgaaccgacttggaaagtaa

SEQ ID NO: 29 - DNA, 9280 bp, Artificial Sequence
  pXDP0017 plasmid sequence
gtcgacattgattattgactagttattaatagtaatcaattacggggtcattagttcatagcccatatatggagttccgcgttacataacttacggtaaatggcccgcctggctgaccgcccaacgacccccgcccattgacgtcaataatgacgtatgttcccatagtaacgccaatagggactttccattgacgtcaatgggtggactatttacggtaaactgcccacttggcagtacatcaagtgtatcatatgccaagtacgccccctattgacgtcaatgacggtaaatggcccgcctggcattatgcccagtacatgaccttatgggactttcctacttggcagtacatctacgtattagtcatcgctattaccatgggtcgaggtgagccccacgttctgcttcactctccccatctcccccccctccccacccccaattttgtatttatttattttttaattattttgtgcagcgatgggggcggggggggggggggcgcgcgccaggcggggcggggcggggcgaggggcggggcggggcgaggcggagaggtgcggcggcagccaatcagagcggcgcgctccgaaagtttccttttatggcgaggcggcggcggcggcggccctataaaaagcgaagcgcgcggcgggcgggagtcgctgcgttgccttcgccccgtgccccgctccgcgccgcctcgcgccgcccgccccggctctgactgaccgcgttactcccacaggtgagcgggcgggacggcccttctcctccgggctgtaattagcgcttggtttaatgacggctcgtttcttttctgtggctgcgtgaaagccttaaagggctccgggagggccctttgtgcgggggggagcggctcggggggtgcgtgcgtgtgtgtgtgcgtggggagcgccgcgtgcggcccgcgctgcccggcggctgtgagcgctgcgggcgcggcgcggggctttgtgcgctccgcgtgtgcgcgaggggagcgcggccgggggcggtgccccgcggtgcgggggggctgcgaggggaacaaaggctgcgtgcggggtgtgtgcgtgggggggtgagcagggggtgtgggcgcggcggtcgggctgtaacccccccctgcacccccctccccgagttgctgagcacggcccggcttcgggtgcggggctccgtgcggggcgtggcgcggggctcgccgtgccgggcggggggtggcggcaggtgggggtgccgggcggggcggggccgcctcgggccggggagggctcgggggaggggcgcggcggccccggagcgccggcggctgtcgaggcgcggcgagccgcagccattgccttttatggtaatcgtgcgagagggcgcagggacttcctttgtcccaaatctggcggagccgaaatctgggaggcgccgccgcaccccctctagcgggcgcgggcgaagcggtgcggcgccggcaggaaggaaatgggcggggagggccttcgtgcgtcgccgcgccgccgtccccttctccatctccagcctcggggctgccgcagggggacggctgccttcgggggggacggggcagggcggggttcggcttctggcgtgtgaccggcggctctagagcctctgctaaccatgttcatgccttcttctttttcctacagctcctgggcaacgtgctggttgttgtgctgtctcatcattttggcaaagaattcgccaccatgggtgcgagagcgtcagtattaagcgggggagaattagatcgatgggaaaaaattcggttaaggccagggggaaagaaaaaatataaattaaaacatatagtatgggcaagcagggagctagaacgattcgcagttaatcctggcctgttagaaacatcagaaggctgtagacaaatactgggacagctacaaccatcccttcagacaggatcagaagaacttagatcattatataatacagtagcaaccctctattgtgtgcatcaaaggatagagataaaagacaccaaggaagctttagacaagatagaggaagagcaaaacaaaagtaagaaaaaagcacagcaagcagcagctgacacaggacacagcaatcaggtcagccaaaattaccctatagtgcagaacatccaggggcaaatggtacatcaggccatatcacctagaactttaaatgcatgggtaaaagtagtagaagagaaggctttcagcccagaagtgatacccatgttttcagcattatcagaaggagccaccccacaagatttaaacaccatgctaaacacagtggggggacatcaagcagccatgcaaatgttaaaagagaccatcaatgaggaagctgcagaatgggatagagtgcatccagtgcatgcagggcctattgcaccaggccagatgagagaaccaaggggaagtgacatagcaggaactactagtacccttcaggaacaaataggatggatgacacataatccacctatcccagtaggagaaatctataaaagatggataatcctgggattaaataaaatagtaagaatgtatagccctaccagcattctggacataagacaaggaccaaaggaaccctttagagactatgtagaccgattctataaaactctaagagccgagcaagcttcacaagaggtaaaaaattggatgacagaaaccttgttggtccaaaatgcgaacccagattgtaagactattttaaaagcattgggaccaggagcgacactagaagaaatgatgacagcatgtcagggagtggggggacccggccataaagcaagagttttggctgaagcaatgagccaagtaacaaatccagctaccataatgatacagaaaggcaattttaggaaccaaagaaagactgttaagtgtttcaattgtggcaaagaagggcacatagccaaaaattgcagggcccctaggaaaaagggctgttggaaatgtggaaaggaaggacaccaaatgaaagattgtactgagagacaggctaattttttagggaagatctggccttcccacaagggaaggccagggaattttcttcagagcagaccagagccaacagccccaccagaagagagcttcaggtttggggaagagacaacaactccctctcagaagcaggagccgatagacaaggaactgtatcctttagcttccctcagatcactctttggcagcgacccctcgtcacaaaactttagccagaactatccgattgtgcagaccggtgccccaaagaagaagcggaaggtctctagacaagagatcaagagaatcaacaagatcagaaggagactggtcaaggacagcaacacaaagaaggccggcaagacaggccccatgaaaaccctgctcgtcagagtgatgacccctgacctgagagagcggctggaaaacctgagaaagaagcccgagaacatccctcagcctatcagcaacaccagcagggccaacctgaacaagctgctgaccgactacaccgagatgaagaaagccatcctgcacgtgtactgggaagagttccagaaagaccccgtgggcctgatgagcagagttgctcagcctgccagcaagaagatcgaccagaacaagctgaagcccgagatggacgagaagggcaatctgaccacagccggctttgcctgctctcagtgtggccagcctctgttcgtgtacaagctggaacaggtgtccgagaaaggcaaggcctacaccaactacttcggcagatgtaacgtggccgagcacgagaagctgattctgctggcccagctgaaacctgagaaggactctgatgaggccgtgacctacagcctgggcaagtttggacagagagccctggacttctacagcatccacgtgaccaaagaaagcacacaccccgtgaagcccctggctcagatcgccggcaatagatacgcctctggacctgtgggcaaagccctgtccgatgcctgcatgggaacaatcgccagcttcctgagcaagtaccaggacatcatcatcgagcaccagaaggtggtcaagggcaaccagaagagactggaaagcctgagggagctggccggcaaagagaacctggaataccccagcgtgaccctgcctcctcagcctcacacaaaagaaggcgtggacgcctacaacgaagtgatcgccagagtgagaatgtgggtcaacctgaacctgtggcagaagctgaaactgtccagggacgacgccaagcctctgctgagactgaagggcttccctagcttccctctggtggaaagacaggccaatgaagtggattggtgggacatggtctgcaacgtgaagaagctgatcaacgagaagaaagaggatggcaaggttttctggcagaacctggccggctacaagagacaagaagccctgaggccttacctgagcagcgaagaggaccggaagaagggcaagaagttcgccagataccagctgggcgacctgctgctgcacctggaaaagaagcacggcgaggactggggcaaagtgtacgatgaggcctgggagagaatcgacaagaaggtggaaggcctgagcaagcacattaagctggaagaggaaagaaggagcgaggacgcccaatctaaagccgctctgaccgattggctgagagccaaggccagctttgtgatcgagggcctgaaagaggccgacaaggacgagttctgcagatgcgagctgaagctgcagaagtggtacggcgatctgagaggcaagcccttcgccattgaggccgagaacagcatcctggacatcagcggcttcagcaagcagtacaactgcgccttcatttggcagaaagacggcgtcaagaaactgaacctgtacctgatcatcaattacttcaaaggcggcaagctgcggttcaagaagatcaaacccgaggccttcgaggctaacagattctacaccgtgatcaacaaaaagtccggcgagatcgtgcccatggaagtgaacttcaacttcgacgaccccaacctgattatcctgcctctggccttcggcaagagacagggcagagagttcatctggaacgatctgctgagcctggaaaccggctctctgaagctggccaatggcagagtgatcgagaaaaccctgtacaacaggagaaccagacaggacgagcctgctctgtttgtggccctgaccttcgagagaagagaggtgctggacagcagcaacatcaagcccatgaacctgatcggcgtggaccggggcgagaatatccctgctgtgatcgccctgacagaccctgaaggatgcccactgagcagattcaaggactccctgggcaaccctacacacatcctgagaatcggcgagagctacaaagagaagcagaggacaatccaggccaagaaagaggtggaacagagaagagccggcggatactctaggaagtacgccagcaaggccaagaatctggccgacgacatggtccgaaacaccgccagagatctgctgtactacgccgtgacacaggacgccatgctgatcttcgagaatctgagcagaggcttcggccggcagggcaagagaacctttatggccgagaggcagtacaccagaatggaagattggctcacagctaaactggcctacgagggactgagcaagacctacctgtccaaaacactggcccagtatacctccaagacctgcagcaattgcggcttcaccatcaccagcgccgactacgacagagtgctggaaaagctcaagaaaaccgccaccggctggatgaccaccatcaacggcaaagagctgaaggttgagggccagatcacctactacaacaggtacaagaggcagaacgtcgtgaaggatctgagcgtggaactggacagactgagcgaagagagcgtgaacaacgacatcagcagctggacaaagggcagatcaggcgaggctctgagcctgctgaagaagaggtttagccacagacctgtgcaagagaagttcgtgtgcctgaactgcggcttcgagacacacgccgatgaacaggctgccctgaacattgccagaagctggctgttcctgagaagccaagagtacaagaagtaccagaccaacaagaccaccggcaacaccgacaagagggcctttgtggaaacctggcagagcttctacagaaaaaagctgaaagaagtctggaagcccgccgtgactagtccaaaaaagaagagaaaggtagccctcgagtacccatatgatgtccctgactacgcttgactagcagatctttttccctctgccaaaaattatggggacatcatgaagccccttgagcatctgacttctggctaataaaggaaatttattttcattgcaatagtgtgttggaattttttgtgtctctcactcggaaggacatatgggagggcaaatcatttaaaacatcagaatgagtatttggtttagagtttggcaacatatgcccatatgctggctgccatgaacaaaggttggctataaagaggtcatcagtatatgaaacagccccctgctgtccattccttattccatagaaaagccttgacttgaggttagattttttttatattttgttttgtgttatttttttctttaacatccctaaaattttccttacatgttttactagccagatttttcctcctctcctgactactcccagtcatagctgtccctcttctcttatgaagatccctcgacctgcagcccaagcttggcgtaatcatggtcatagctgtttcctgtgtgaaattgttatccgctcacaattccacacaacatacgagccggaagcataaagtgtaaagcctggggtgcctaatgagtgagctaactcacattaattgcgttgcgctcactgcccgctttccagtcgggaaacctgtcgtgccagcggatccgcatctcaattagtcagcaaccatagtcccgcccctaactccgcccatcccgcccctaactccgcccagttccgcccattctccgccccatggctgactaattttttttatttatgcagaggccgaggccgcctcggcctctgagctattccagaagtagtgaggaggcttttttggaggcctaggcttttgcaaaaagctaacttgtttattgcagcttataatggttacaaataaagcaatagcatcacaaatttcacaaataaagcatttttttcactgcattctagttgtggtttgtccaaactcatcaatgtatcttatcatgtctggatccgctgcattaatgaatcggccaacgcgcggggagaggcggtttgcgtattgggcgctcttccgcttcctcgctcactgactcgctgcgctcggtcgttcggctgcggcgagcggtatcagctcactcaaaggcggtaatacggttatccacagaatcaggggataacgcaggaaagaacatgtgagcaaaaggccagcaaaaggccaggaaccgtaaaaaggccgcgttgctggcgtttttccataggctccgcccccctgacgagcatcacaaaaatcgacgctcaagtcagaggtggcgaaacccgacaggactataaagataccaggcgtttccccctggaagctccctcgtgcgctctcctgttccgaccctgccgcttaccggatacctgtccgcctttctcccttcgggaagcgtggcgctttctcaatgctcacgctgtaggtatctcagttcggtgtaggtcgttcgctccaagctgggctgtgtgcacgaaccccccgttcagcccgaccgctgcgccttatccggtaactatcgtcttgagtccaacccggtaagacacgacttatcgccactggcagcagccactggtaacaggattagcagagcgaggtatgtaggcggtgctacagagttcttgaagtggtggcctaactacggctacactagaaggacagtatttggtatctgcgctctgctgaagccagttaccttcggaaaaagagttggtagctcttgatccggcaaacaaaccaccgctggtagcggtggtttttttgtttgcaagcagcagattacgcgcagaaaaaaaggatctcaagaagatcctttgatcttttctacggggtctgacgctcagtggaacgaaaactcacgttaagggattttggtcatgagattatcaaaaaggatcttcacctagatccttttaaattaaaaatgaagttttaaatcaatctaaagtatatatgagtaaacttggtctgacagttaccaatgcttaatcagtgaggcacctatctcagcgatctgtctatttcgttcatccatagttgcctgactccccgtcgtgtagataactacgatacgggagggcttaccatctggccccagtgctgcaatgataccgcgagacccacgctcaccggctccagatttatcagcaataaaccagccagccggaagggccgagcgcagaagtggtcctgcaactttatccgcctccatccagtctattaattgttgccgggaagctagagtaagtagttcgccagttaatagtttgcgcaacgttgttgccattgctacaggcatcgtggtgtcacgctcgtcgtttggtatggcttcattcagctccggttcccaacgatcaaggcgagttacatgatcccccatgttgtgcaaaaaagcggttagctccttcggtcctccgatcgttgtcagaagtaagttggccgcagtgttatcactcatggttatggcagcactgcataattctcttactgtcatgccatccgtaagatgcttttctgtgactggtgagtactcaaccaagtcattctgagaatagtgtatgcggcgaccgagttgctcttgcccggcgtcaatacgggataataccgcgccacatagcagaactttaaaagtgctcatcattggaaaacgttcttcggggcgaaaactctcaaggatcttaccgctgttgagatccagttcgatgtaacccactcgtgcacccaactgatcttcagcatcttttactttcaccagcgtttctgggtgagcaaaaacaggaaggcaaaatgccgcaaaaaagggaataagggcgacacggaaatgttgaatactcatactcttcctttttcaatattattgaagcatttatcagggttattgtctcatgagcggatacatatttgaatgtatttagaaaaataaacaaataggggttccgcgcacatttccccgaaaagtgccacctg

SEQ ID NO: 30 - DNA, 10690 bp, Artificial Sequence
  pXDP0001 plasmid sequence
ggagtcgctgcgcgctgccttcgccccgtgccccgctccgccgccgcctcgcgccgcccgccccggctctgactgaccgcgttactcccacaggtgagcgggcgggacggcccttctcctccgggctgtaattagcgcttggtttaatgacggcttgtttcttttctgtggctgcgtgaaagccttgaggggctccgggagggccctttgtgcggggggagcggctcggggggtgcgtgcgtgtgtgtgtgcgtggggagcgccgcgtgcggctccgcgctgcccggcggctgtgagcgctgcgggcgcggcgcggggctttgtgcgctccgcagtgtgcgcgaggggagcgcggccgggggcggtgccccgcggtgcggggggggctgcgaggggaacaaaggctgcgtgcggggtgtgtgcgtgggggggtgagcagggggtgtgggcgcgtcggtcgggctgcaaccccccctgcacccccctccccgagttgctgagcacggcccggcttcgggtgcggggctccgtacggggcgtggcgcggggctcgccgtgccgggcggggggtggcggcaggtgggggtgccgggcggggcggggccgcctcgggccggggagggctcgggggaggggcgcggcggcccccggagcgccggcggctgtcgaggcgcggcgagccgcagccattgccttttatggtaatcgtgcgagagggcgcagggacttcctttgtcccaaatctgtgcggagccgaaatctgggaggcgccgccgcaccccctctagcgggcgcggggcgaagcggtgcggcgccggcaggaaggaaatgggcggggagggccttcgtgcgtcgccgcgccgccgtccccttctccctctccagcctcggggctgtccgcggggggacggctgccttcgggggggacggggcagggcggggttcggcttctggcgtgtgaccggcggctctagagcctctgctaaccatgttcatgccttcttctttttcctacagctcctgggcaacgtgctggttattgtgctgtctcatcattttggcaaagaattcgggccgcgttgacgcgcacggcaagaggcgaggggcggcgactggtgagagatgggtgcgagagcgtcagtattaagcgggggagaattagatcgatgggaaaaaattcggttaaggccagggggaaagaaaaaatataaattaaaacatatagtatgggcaagcagggagctagaacgattcgcagttaatcctggcctgttagaaacatcagaaggctgtagacaaatactgggacagctacaaccatcccttcagacaggatcagaagaacttagatcattatataatacagtagcaaccctctattgtgtgcatcaaaggatagagataaaagacaccaaggaagctttagacaagatagaggaagagcaaaacaaaagtaagaaaaaagcacagcaagcagcagctgacacaggacacagcaatcaggtcagccaaaattaccctatagtgcagaacatccaggggcaaatggtacatcaggccatatcacctagaactttaaatgcatgggtaaaagtagtagaagagaaggctttcagcccagaagtgatacccatgttttcagcattatcagaaggagccaccccacaagatttaaacaccatgctaaacacagtggggggacatcaagcagccatgcaaatgttaaaagagaccatcaatgaggaagctgcagaatgggatagagtgcatccagtgcatgcagggcctattgcaccaggccagatgagagaaccaaggggaagtgacatagcaggaactactagtacccttcaggaacaaataggatggatgacacataatccacctatcccagtaggagaaatctataaaagatggataatcctgggattaaataaaatagtaagaatgtatagccctaccagcattctggacataagacaaggaccaaaggaaccctttagagactatgtagaccgattctataaaactctaagagccgagcaagcttcacaagaggtaaaaaattggatgacagaaaccttgttggtccaaaatgcgaacccagattgtaagactattttaaaagcattgggaccaggagcgacactagaagaaatgatgacagcatgtcagggagtggggggacccggccataaagcaagagttttggctgaagcaatgagccaagtaacaaatccagctaccataatgatacagaaaggcaattttaggaaccaaagaaagactgttaagtgtttcaattgtggcaaagaagggcacatagccaaaaattgcagggcccctaggaaaaagggctgttggaaatgtggaaaggaaggacaccaaatgaaagattgtactgagagacaggctaattttttagggaagatctggccttcccacaagggaaggccagggaattttcttcagagcagaccagagccaacagccccaccagaagagagcttcaggtttggggaagagacaacaactccctctcagaagcaggagccgatagacaaggaactgtatcctttagcttccctcagatcactctttggcagcgacccctcgtcacaataaagataggggggcaattaaaggaagctctattagatacaggagcagatgatacagtattagaagaaatgaatttgccaggaagatggaaaccaaaaatgatagggggaattggaggttttatcaaagtaagacagtatgatcagatactcatagaaatctgcggacataaagctataggtacagtattagtaggacctacacctgtcaacataattggaagaaatctgttgactcagattggctgcactttaaattttcccattagtcctattgagactgtaccagtaaaattaaagccaggaatggatggcccaaaagttaaacaatggccattgacagaagaaaaaataaaagcattagtagaaatttgtacagaaatggaaaaggaaggaaaaatttcaaaaattgggcctgaaaatccatacaatactccagtatttgccataaagaaaaaagacagtactaaatggagaaaattagtagatttcagagaacttaataagagaactcaagatttctgggaagttcaattaggaataccacatcctgcagggttaaaacagaaaaaatcagtaacagtactggatgtgggcgatgcatatttttcagttcccttagataaagacttcaggaagtatactgcatttaccatacctagtataaacaatgagacaccagggattagatatcagtacaatgtgcttccacagggatggaaaggatcaccagcaatattccagtgtagcatgacaaaaatcttagagccttttagaaaacaaaatccagacatagtcatctatcaatacatggatgatttgtatgtaggatctgacttagaaatagggcagcatagaacaaaaatagaggaactgagacaacatctgttgaggtggggatttaccacaccagacaaaaaacatcagaaagaacctccattcctttggatgggttatgaactccatcctgataaatggacagtacagcctatagtgctgccagaaaaggacagctggactgtcaatgacatacagaaattagtgggaaaattgaattgggcaagtcagatttatgcagggattaaagtaaggcaattatgtaaacttcttaggggaaccaaagcactaacagaagtagtaccactaacagaagaagcagagctagaactggcagaaaacagggagattctaaaagaaccggtacatggagtgtattatgacccatcaaaagacttaatagcagaaatacagaagcaggggcaaggccaatggacatatcaaatttatcaagagccatttaaaaatctgaaaacaggaaagtatgcaagaatgaagggtgcccacactaatgatgtgaaacaattaacagaggcagtacaaaaaatagccacagaaagcatagtaatatggggaaagactcctaaatttaaattacccatacaaaaggaaacatgggaagcatggtggacagagtattggcaagccacctggattcctgagtgggagtttgtcaatacccctcccttagtgaagttatggtaccagttagagaaagaacccataataggagcagaaactttctatgtagatggggcagccaatagggaaactaaattaggaaaagcaggatatgtaactgacagaggaagacaaaaagttgtccccctaacggacacaacaaatcagaagactgagttacaagcaattcatctagctttgcaggattcgggattagaagtaaacatagtgacagactcacaatatgcattgggaatcattcaagcacaaccagataagagtgaatcagagttagtcagtcaaataatagagcagttaataaaaaaggaaaaagtctacctggcatgggtaccagcacacaaaggaattggaggaaatgaacaagtagataaattggtcagtgctggaatcaggaaagtactatttttagatggaatagataaggcccaagaagaacatgagaaatatcacagtaattggagagcaatggctagtgattttaacctaccacctgtagtagcaaaagaaatagtagccagctgtgataaatgtcagctaaaaggggaagccatgcatggacaagtagactgtagcccaggaatatggcagctagattgtacacatttagaaggaaaagttatcttggtagcagttcatgtagccagtggatatatagaagcagaagtaattccagcagagacagggcaagaaacagcatacttcctcttaaaattagcaggaagatggccagtaaaaacagtacatacagacaatggcagcaatttcaccagtactacagttaaggccgcctgttggtgggcggggatcaagcaggaatttggcattccctacaatccccaaagtcaaggagtaatagaatctatgaataaagaattaaagaaaattataggacaggtaagagatcaggctgaacatcttaagacagcagtacaaatggcagtattcatccacaattttaaaagaaaaggggggattggggggtacagtgcaggggaaagaatagtagacataatagcaacagacatacaaactaaagaattacaaaaacaaattacaaaaattcaaaattttcgggtttattacagggacagcagagatccagtttggaaaggaccagcaaagctcctctggaaaggtgaaggggcagtagtaatacaagataatagtgacataaaagtagtgccaagaagaaaagcaaagatcatcagggattatggaaaacagatggcaggtgatgattgtgtggcaagtagacaggatgaggattaacacatggaattctgcaacaactgctgtttatccatttcagaattgggtgtcgacatagcagaataggcgttactcgacagaggagagcaagaaatggagccagtagatcctagactagagccctggaagcatccaggaagtcagcctaaaactgcttgtaccaattgctattgtaaaaagtgttgctttcattgccaagtttgtttcatgacaaaagccttaggcatctcctatggcaggaagaagcggagacagcgacgaagagctcatcagaacagtcagactcatcaagcttctctatcaaagcagtaagtagtacatgtaatgcaacctataatagtagcaatagtagcattagtagtagcaataataatagcaatagttgtgtggtccatagtaatcatagaatataggaaaatggccgctgatcttcagacctggaggaggagatatgagggacaattggagaagtgaattatataaatataaagtagtaaaaattgaaccattaggagtagcacccaccaaggcaaagagaagagtggtgcagagagaaaaaagagcagtgggaataggagctttgttccttgggttcttgggagcagcaggaagcactatgggcgcagcgtcaatgacgctgacggtacaggccagacaattattgtctggtatagtgcagcagcagaacaatttgctgagggctattgaggcgcaacagcatctgttgcaactcacagtctggggcatcaagcagctccaggcaagaatcctggctgtggaaagatacctaaaggatcaacagctcctggggatttggggttgctctggaaaactcatttgcaccactgctgtgccttggaatgctagttggagtaataaatctctggaacagatttggaatcacacgacctggatggagtgggacagagaaattaacaattacacaagcttaatacactccttaattgaagaatcgcaaaaccagcaagaaaagaatgaacaagaattattggaattagataaatgggcaagtttgtggaattggtttaacataacaaattggctgtggtatataaaattattcataatgatagtaggaggcttggtaggtttaagaatagtttttgctgtactttctatagtgaatagagttaggcagggatattcaccattatcgtttcagacccacctcccaaccccgaggggacccgacaggcccgaaggaatagaagaagaaggtggagagagagacagagacagatccattcgattagtgaacggatccttggcacttatctgggacgatctgcggagcctgtgcctcttcagctaccaccgcttgagagacttactcttgattgtaacgaggattgtggaacttctgggacgcagggggtgggaagccctcaaatattggtggaatctcctacaatattggagtcaggagctaaagaatagtgctgttagcttgctcaatgccacagccatagcagtagctgaggggacagatagggttatagaagtagtacaaggagcttgtagagctattcgccacatacctagaagaataagacagggcttggaaaggattttgctataagctcgaaacaaccggtacctctagaactatagctagcagatctttttccctctgccaaaaattatggggacatcatgaagccccttgagcatctgacttctggctaataaaggaaatttattttcattgcaatagtgtgttggaattttttgtgtctctcactcggaaggacatatgggagggcaaatcatttaaaacatcagaatgagtatttggtttagagtttggcaacatatgcccatatgctggctgccatgaacaaaggttggctataaagaggtcatcagtatatgaaacagccccctgctgtccattccttattccatagaaaagccttgacttgaggttagattttttttatattttgttttgtgttatttttttctttaacatccctaaaattttccttacatgttttactagccagatttttcctcctctcctgactactcccagtcatagctgtccctcttctcttatggagatccctcgacctgcagcccaagcttggcgtaatcatggtcatagctgtttcctgtgtgaaattgttatccgctcacaattccacacaacatacgagccggaagcataaagtgtaaagcctggggtgcctaatgagtgagctaactcacattaattgcgttgcgctcactgcccgctttccagtcgggaaacctgtcgtgccagcggatccgcatctcaattagtcagcaaccatagtcccgcccctaactccgcccatcccgcccctaactccgcccagttccgcccattctccgccccatggctgactaattttttttatttatgcagaggccgaggccgcctcggcctctgagctattccagaagtagtgaggaggcttttttggaggcctaggcttttgcaaaaagctaacttgtttattgcagcttataatggttacaaataaagcaatagcatcacaaatttcacaaataaagcatttttttcactgcattctagttgtggtttgtccaaactcatcaatgtatcttatcatgtctggatccgctgcattaatgaatcggccaacgcgcggggagaggcggtttgcgtattgggcgctcttccgcttcctcgctcactgactcgctgcgctcggtcgttcggctgcggcgagcggtatcagctcactcaaaggcggtaatacggttatccacagaatcaggggataacgcaggaaagaacatgtgagcaaaaggccagcaaaaggccaggaaccgtaaaaaggccgcgttgctggcgtttttccataggctccgcccccctgacgagcatcacaaaaatcgacgctcaagtcagaggtggcgaaacccgacaggactataaagataccaggcgtttccccctggaagctccctcgtgcgctctcctgttccgaccctgccgcttaccggatacctgtccgcctttctcccttcgggaagcgtggcgctttctcatagctcacgctgtaggtatctcagttcggtgtaggtcgttcgctccaagctgggctgtgtgcacgaaccccccgttcagcccgaccgctgcgccttatccggtaactatcgtcttgagtccaacccggtaagacacgacttatcgccactggcagcagccactggtaacaggattagcagagcgaggtatgtaggcggtgctacagagttcttgaagtggtggcctaactacggctacactagaagaacagtatttggtatctgcgctctgctgaagccagttaccttcggaaaaagagttggtagctcttgatccggcaaacaaaccaccgctggtagcggtggtttttttgtttgcaagcagcagattacgcgcagaaaaaaaggatctcaagaagatcctttgatcttttctacggggtctgacgctcagtggaacgaaaactcacgttaagggattttggtcatgagattatcaaaaaggatcttcacctagatccttttaaattaaaaatgaagttttaaatcaatctaaagtatatatgagtaaacttggtctgacagttaccaatgcttaatcagtgaggcacctatctcagcgatctgtctatttcgttcatccatagttgcctgactccccgtcgtgtagataactacgatacgggagggcttaccatctggccccagtgctgcaatgataccgcgagacccacgctcaccggctccagatttatcagcaataaaccagccagccggaagggccgagcgcagaagtggtcctgcaactttatccgcctccatccagtctattaattgttgccgggaagctagagtaagtagttcgccagttaatagtttgcgcaacgttgttgccattgctacaggcatcgtggtgtcacgctcgtcgtttggtatggcttcattcagctccggttcccaacgatcaaggcgagttacatgatcccccatgttgtgcaaaaaagcggttagctccttcggtcctccgatcgttgtcagaagtaagttggccgcagtgttatcactcatggttatggcagcactgcataattctcttactgtcatgccatccgtaagatgcttttctgtgactggtgagtactcaaccaagtcattctgagaatagtgtatgcggcgaccgagttgctcttgcccggcgtcaatacgggataataccgcgccacatagcagaactttaaaagtgctcatcattggaaaacgttcttcggggcgaaaactctcaaggatcttaccgctgttgagatccagttcgatgtaacccactcgtgcacccaactgatcttcagcatcttttactttcaccagcgtttctgggtgagcaaaaacaggaaggcaaaatgccgcaaaaaagggaataagggcgacacggaaatgttgaatactcatactcttcctttttcaatattattgaagcatttatcagggttattgtctcatgagcggatacatatttgaatgtatttagaaaaataaacaaataggggttccgcgcacatttccccgaaaagtgccacctgggtcgacattgattattgactagttattaatagtaatcaattacggggtcattagttcatagcccatatatggagttccgcgttacataacttacggtaaatggcccgcctggctgaccgcccaacgacccccgcccattgacgtcaataatgacgtatgttcccatagtaacgccaatagggactttccattgacgtcaatgggtggagtatttacggtaaactgcccacttggcagtacatcaagtgtatcatatgccaagtacgccccctattgacgtcaatgacggtaaatggcccgcctggcattatgcccagtacatgaccttatgggactttcctacttggcagtacatctacgtattagtcatcgctattaccatggtcgaggtgagccccacgttctgcttcactctccccatctcccccccctccccacccccaattttgtatttatttattttttaattattttgtgcagcgatgggggcggggggggggggggggcggggcgaggggcggggcggggcgaggcggagaggtgcggcggcagccaatcagagcggcgcgctccgaaagtttccttttatggcgaggcggcggcggcggcggccctataaaaagcgaagcgcgcggcgggcg

SEQ ID NO: 31 - protein, 84 aa, Unknown
  chloroplast transit peptides
MASMISSSAVTTVSRASRGQSAAMAPFGGLKSMTGFPVRKVNTDITSITSNGGRVKCMQVWPPIGKKKFETLSYLPPLTRDSRA

SEQ ID NO: 32 - RNA, 21 nt, Artificial Sequence
  scaffold stem loop
ccagcgacuaugucguagugg

SEQ ID NO: 33 - protein, 692 aa, Homo sapiens
MGTVSSRRSWWPLPLLLLLLLLLGPAGARAQEDEDGDYEELVLALRSEEDGLAEAPEHGTTATFHRCAKDPWRLPGTYVVVLKEETHLSQSERTARRLQAQAARRGYLTKILHVFHGLLPGFLVKMSGDLLELALKLPHVDYIEEDSSVFAQSIPWNLERITPPRYRADEYQPPDGGSLVEVYLLDTSIQSDHREIEGRVMVTDFENVPEEDGTRFHRQASKCDSHGTHLAGVVSGRDAGVAKGASMRSLRVLNCQGKGTVSGTLIGLEFIRKSQLVQPVGPLVVLLPLAGGYSRVLNAACQRLARAGVVLVTAAGNFRDDACLYSPASAPEVITVGATNAQDQPVTLGTLGTNFGRCVDLFAPGEDIIGASSDCSTCFVSQSGTSQAAAHVAGIAAMMLSAEPELTLAELRQRLIHFSAKDVINEAWFPEDQRVLTPNLVAALPPSTHGAGWQLFCRTVWSAHSGPTRMATAVARCAPDEELLSCSSFSRSGKRRGERMEAQGGKLVCRAHNAFGGEGVYAIARCCLLPQANCSVHTAPPAEASMGTRVHCHQQGHVLTGCSSHWEVEDLGTHKPPVLRPRGQPNQCVGHREASIHASCCHAPGLECKVKEHGIPAPQEQVTVACEEGWTLTGCSALPGTSHVLGAYAVDNTCVVRSRDVSTTGSTSEGAVTAVAICCRSRHLAQASQELQ

SEQ ID NO: 34 - RNA, 31 nt, Artificial Sequence
  stem loop sequence
  misc_feature (4)..(28): n is any ribonucleotide
  misc_feature (8)..(28): These individual nucleotides may be absent
uuunnnnnnnnnnnnnnnnnnnnnnnnnuuu

SEQ ID NO: 35 - RNA, 19 nt, Unknown
  extended stem loop region
acaugaggauuacccaugu

SEQ ID NO: 36 - RNA, 18 nt, Unknown
  extended stem loop region
ugcaugucuaagacagca

SEQ ID NO: 37 - RNA, 20 nt, Unknown
  extended stem loop region
aauccauugcacuccggauu

SEQ ID NO: 38 - RNA, 12 nt, Unknown
  extended stem loop region
ccucuucggagg

SEQ ID NO: 39 - RNA, 21 nt, Unknown
  extended stem loop region
aggaguuucuauggaaacccu

SEQ ID NO: 40 - RNA, 30 nt, Unknown
  extended stem loop region
aggugggacgaccucucggucguccuaucu

SEQ ID NO: 41 - RNA, 19 nt, Unknown
  extended stem loop region
ugcucgcuccguucgagca

SEQ ID NO: 42 - RNA, 21 nt, Unknown
  extended stem loop region
ugcucgacgcguccucgagca

SEQ ID NO: 43 - RNA, 22 nt, Unknown
  extended stem loop region
ugcucguuugcggcuacgagca

SEQ ID NO: 44 - RNA, 17 nt, Unknown
  extended stem loop region
agggagggagggagagg

SEQ ID NO: 45 - RNA, 19 nt, Unknown
  extended stem loop region
gguuaggguuaggguuagg

SEQ ID NO: 46 - RNA, 25 nt, Unknown
  extended stem loop region
cugcucaguacgagaggaaccgcag

SEQ ID NO: 47 - RNA, 78 nt, Unknown
  extended stem loop region
uacacugggaucgcugaauuagagaucggcguccuuucauucuauauacuuuggaguuuuaaaaugucucuaaguaca

SEQ ID NO: 48 - protein, 4 aa, Unknown
  zinc finger/ribbon domain
  misc_feature (2)..(3): Xaa is any amino acid
CXXC

SEQ ID NO: 49 - protein, 978 aa, Artificial Sequence
  CasX Variant
MQEIKRINKIRRRLVKDSNTKKAGKTGPMKTLLVRVMTPDLRERLENLRKKPENIPQPISNTSRANLNKLLTDYTEMKKAILHVYWEEFQKDPVGLMSRVAQPASKKIDQNKLKPEMDEKGNLTTAGFACSQCGQPLFVYKLEQVSEKGKAYTNYFGRCNVAEHEKLILLAQLKPEKDSDEAVTYSLGKFGQRALDFYSIHVTRESNHPVKPLEQIGGNSCASGPVGKALSDACMGAVASFLTKYQDIILEHQKVIKKNEKRLANLKDIASANGLAFPKITLPPQPHTKEGIEAYNNVVAQIVIWVNLNLWQKLKIGRDEAKPLQRLKGFPSFPLVERQANEVDWWDMVCNVKKLINEKKEDGKVFWQNLAGYKRQEALRPYLSSEEDRKKGKKFARYQFGDLLLHLEKKHGEDWGKVYDEAWERIDKKVEGLSKHIKLEEERRSEDAQSKAALTDWLRAKASFVIEGLKEADKDEFCRCELKLQKWYGDLRGKPFAIEAENSILDISGFSKQYNCAFIWQKDGVKKLNLYLIINYFKGGKLRFKKIKPEAFEANRFYTVINKKSGEIVPMEVNFNFDDPNLIILPLAFGKRQGREFIWNDLLSLETGSLKLANGRVIEKTLYNRRTRQDEPALFVALTFERREVLDSSNIKPMNLIGIDRGENIPAVIALTDPEGCPLSRFKDSLGNPTHILRIGESYKEKQRTIQAKKEVEQRRAGGYSRKYASKAKNLADDMVRNTARDLLYYAVTQDAMLIFENLSRGFGRQGKRTFMAERQYTRMEDWLTAKLAYEGLSKTYLSKTLAQYTSKTCSNCGFTITSADYDRVLEKLKKTATGWMTTINGKELKVEGQITYYNRYKRQNVVKDLSVELDRLSEESVNNDISSWTKGRSGEALSLLKKRFSHRPVQEKFVCLNCGFETHADEQAALNIARSWLFLRSQEYKKYQTNKTTGNTDKRAFVETWQSFYRKKLKEVWKPAV

SEQ ID NO: 50 - protein, 977 aa, Artificial Sequence
  CasX Variant
MQEIKRINKIRRRLVKDSNTKKAGKTGPMKTLLVRVMTPDLRERLENLRKKPENIPQPISNTSRANLNKLLTDYTEMKKAILHVYWEEFQKDPVGLMSRVAQPAPKNIDQRKLIPVKDGNERLTSSGFACSQCCQPLYVYKLEQVNDKGKPHTNYFGRCNVSEHERLILLSPHKPEANDELVTYSLGKFGQRALDFYSIHVTRESNHPVKPLEQIGGNSCASGPVGKALSDACMGAVASFLTKYQDIILEHQKVIKKNEKRLANLKDIASANGLAFPKITLPPQPHTKEGIEAYNNVVAQIVIWVNLNLWQKLKIGRDEAKPLQRLKGFPSFPLVERQANEVDWWDMVCNVKKLINEKKEDGKVFWQNLAGYKRQEALRPYLSSEEDRKKGKKFARYQFGDLLLHLEKKHGEDWGKVYDEAWERIDKKVEGLSKHIKLEEERRSEDAQSKAALTDWLRAKASFVIEGLKEADKDEFCRCELKLQKWYGDLRGKPFAIEAENSILDISGFSKQYNCAFIWQKDGVKKLNLYLIINYFKGGKLRFKKIKPEAFEANRFYTVINKKSGEIVPMEVNFNFDDPNLIILPLAFGKRQGREFIWNDLLSLETGSLKLANGRVIEKTLYNRRTRQDEPALFVALTFERREVLDSSNIKPMNLIGIDRGENIPAVIALTDPEGCPLSRFKDSLGNPTHILRIGESYKEKQRTIQAKKEVEQRRAGGYSRKYASKAKNLADDMVRNTARDLLYYAVTQDAMLIFENLSRGFGRQGKRTFMAERQYTRMEDWLTAKLAYEGLSKTYLSKTLAQYTSKTCSNCGFTITTADYDGMLVRLKKTSDGWATTLNNKELKAEGQITYYNRYKRQTVEKELSAELDRLSEESGNNDISKWTKGRRDEALFLLKKRFSHRPVQEQFVCLDCGHEVHADEQAALNIARSWLFLRSQEYKKYQTNKTTGNTDKRAFVETWQSFYRKKLKEVWKPAV

SEQ ID NO: 51 - protein, 985 aa, Artificial Sequence
  CasX Variant
MEKRINKIRKKLSADNATKPVSRSGPMKTLLVRVMTDDLKKRLEKRRKKPEVMPQVISNNAANNLRMLLDDYTKMKEAILQVYWQEFKDDHVGLMCKFAQPAPKNIDQRKLIPVKDGNERLTSSGFACSQCCQPLYVYKLEQVNDKGKPHTNYFGRCNVSEHERLILLSPHKPEANDELVTYSLGKFGQRALDFYSIHVTKESTHPVKPLAQIAGNRYASGPVGKALSDACMGTIASFLSKYQDIIIEHQKVVKGNQKRLESLRELAGKENLEYPSVTLPPQPHTKEGVDAYNEVIARVRMWVNLNLWQKLKLSRDDAKPLLRLKGFPSFPVVERRENEVDWWNTINEVKKLIDAKRDMGRVFWSGVTAEKRNTILEGYNYLPNENDHKKREGSLENPKKPAKRQFGDLLLYLEKKYAGDWGKVFDEAWERIDKKIAGLTSHIEREEARNAEDAQSKAVLTDWLRAKASFVLERLKEMDEKEFYACEIQLQKWYGDLRGNPFAVEAENRVVDISGFSIGSDGHSIQYRNLLAWKYLENGKREFYLLMNYGKKGRIRFTDGTDIKKSGKWQGLLYGGGKAKVIDLTFDPDDEQLIILPLAFGTRQGREFIWNDLLSLETGLIKLANGRVIEKTIYNKKIGRDEPALFVALTFERREVVDPSNIKPVNLIGVDRGENIPAVIALTDPEGCPLPEFKDSSGGPTDILRIGEGYKEKQRAIQAAKEVEQRRAGGYSRKFASKSRNLADDMVRNSARDLFYHAVTHDAVLVFENLSRGFGRQGKRTFMTERQYTKMEDWLTAKLAYEGLTSKTYLSKTLAQYTSKTCSNCGFTITTADYDGMLVRLKKTSDGWATTLNNKELKAEGQITYYNRYKRQTVEKELSAELDRLSEESGNNDISKWTKGRRDEALFLLKKRFSHRPVQEQFVCLDCGHEVHADEQAALNIARSWLFLNSNSTEFKSYKSGKQPFVGAWQAFYKRRLKEVWKPNA

SEQ ID NO: 52 - protein, 986 aa, Artificial Sequence
  CasX Variant
MEKRINKIRKKLSADNATKPVSRSGPMKTLLVRVMTDDLKKRLEKRRKKPEVMPQVISNNAANNLRMLLDDYTKMKEAILQVYWQEFKDDHVGLMCKFAQPASKKIDQNKLKPEMDEKGNLTTAGFACSQCGQPLFVYKLEQVSEKGKAYTNYFGRCNVAEHEKLILLAQLKPEKDSDEAVTYSLGKFGQRALDFYSIHVTKESTHPVKPLAQIAGNRYASGPVGKALSDACMGTIASFLSKYQDIIIEHQKVVKGNQKRLESLRELAGKENLEYPSVTLPPQPHTKEGVDAYNEVIARVRMWVNLNLWQKLKLSRDDAKPLLRLKGFPSFPVVERRENEVDWWNTINEVKKLIDAKRDMGRVFWSGVTAEKRNTILEGYNYLPNENDHKKREGSLENPKKPAKRQFGDLLLYLEKKYAGDWGKVFDEAWERIDKKIAGLTSHIEREEARNAEDAQSKAVLTDWLRAKASFVLERLKEMDEKEFYACEIQLQKWYGDLRGNPFAVEAENRVVDISGFSIGSDGHSIQYRNLLAWKYLENGKREFYLLMNYGKKGRIRFTDGTDIKKSGKWQGLLYGGGKAKVIDLTFDPDDEQLIILPLAFGTRQGREFIWNDLLSLETGLIKLANGRVIEKTIYNKKIGRDEPALFVALTFERREVVDPSNIKPVNLIGVDRGENIPAVIALTDPEGCPLPEFKDSSGGPTDILRIGEGYKEKQRAIQAAKEVEQRRAGGYSRKFASKSRNLADDMVRNSARDLFYHAVTHDAVLVFENLSRGFGRQGKRTFMTERQYTKMEDWLTAKLAYEGLTSKTYLSKTLAQYTSKTCSNCGFTITSADYDRVLEKLKKTATGWMTTINGKELKVEGQITYYNRYKRQNVVKDLSVELDRLSEESVNNDISSWTKGRSGEALSLLKKRFSHRPVQEKFVCLNCGFETHADEQAALNIARSWLFLNSNSTEFKSYKSGKQPFVGAWQAFYKRRLKEVWKPNA

SEQ ID NO: 53 - protein, 921 aa, Artificial Sequence
  CasX Variant
MQEIKRINKIRRRLVKDSNTKKAGKTGPMKTLLVRVMTPDLRERLENLRKKPENIPQPISNTSRANLNKLLTDYTEMKKAILHVYWEEFQKDPVGLMSRVAQPAPKNIDQRKLIPVKDGNERLTSSGFACSQCCQPLYVYKLEQVNDKGKPHTNYFGRCNVSEHERLILLSPHKPEANDELVTYSLGKFGQRALDFYSIHVTRESNHPVKPLEQIGGNSCASGPVGKALSDACMGAVASFLTKYQDIILEHQKVIKKNEKRLANLKDIASANGLAFPKITLPPQPHTKEGIEAYNNVVAQIVIWVNLNLWQKLKIGRDEAKPLQRLKGFPSFPLVERQANEVDWWDMVCNVKKLINEKKEDGKVFWQNLAGYKRQEALRPYLSSEEDRKKGKKFARYQFGDLLLHLEKKHGEDWGKVYDEAWERIDKKVEGLSKHIKLEEERRSEDAQSKAALTDWLRAKASFVIEGLKEADKDEFCRCELKLQKWYGDLRGKPFAIEAENSILDISGFSKQYNCAFIWQKDGVKKLNLYLIINYFKGGKLRFKKIKPEAFEANRFYTVINKKSGEIVPMEVNFNFDDPNLIILPLAFGKRQGREFIWNDLLSLETGSLKLANGRVIEKTLYNRRTRQDEPALFVALTFERREVLDSSNIKPVNLIGVDRGENIPAVIALTDPEGCPLPEFKDSSGGPTDILRIGEGYKEKQRAIQAAKEVEQRRAGGYSRKFASKSRNLADDMVRNSARDLFYHAVTHDAVLVFENLSRGFGRQGKRTFMTERQYTKMEDWLTAKLAYEGLTSKTYLSKTLAQYTSKTCSNCGFTITSADYDRVLEKLKKTATGWMTTINGKELKVEGQITYYNRYKRQNVVKDLSVELDRLSEESVNNDISSWTKGRSGEALSLLKKRFSHRPVQEKFVCLNCGFETHA

SEQ ID NO: 54 - protein, 920 aa, Artificial Sequence
  CasX Variant
MQEIKRINKIRRRLVKDSNTKKAGKTGPMKTLLVRVMTPDLRERLENLRKKPENIPQPISNTSRANLNKLLTDYTEMKKAILHVYWEEFQKDPVGLMSRVAQPAPKNIDQRKLIPVKDGNERLTSSGFACSQCCQPLYVYKLEQVNDKGKPHTNYFGRCNVSEHERLILLSPHKPEANDELVTYSLGKFGQRALDFYSIHVTRESNHPVKPLEQIGGNSCASGPVGKALSDACMGAVASFLTKYQDIILEHQKVIKKNEKRLANLKDIASANGLAFPKITLPPQPHTKEGIEAYNNVVAQIVIWVNLNLWQKLKIGRDEAKPLQRLKGFPSFPLVERQANEVDWWDMVCNVKKLINEKKEDGKVFWQNLAGYKRQEALRPYLSSEEDRKKGKKFARYQFGDLLLHLEKKHGEDWGKVYDEAWERIDKKVEGLSKHIKLEEERRSEDAQSKAALTDWLRAKASFVIEGLKEADKDEFCRCELKLQKWYGDLRGKPFAIEAENSILDISGFSKQYNCAFIWQKDGVKKLNLYLIINYFKGGKLRFKKIKPEAFEANRFYTVINKKSGEIVPMEVNFNFDDPNLIILPLAFGKRQGREFIWNDLLSLETGSLKLANGRVIEKTLYNRRTRQDEPALFVALTFERREVLDSSNIKPMNLIGIDRGENIPAVIALTDPEGCPLSRFKDSLGNPTHILRIGESYKEKQRTIQAKKEVEQRRAGGYSRKYASKAKNLADDMVRNTARDLLYYAVTQDAMLIFENLSRGFGRQGKRTFMAERQYTRMEDWLTAKLAYEGLSKTYLSKTLAQYTSKTCSNCGFTITSADYDRVLEKLKKTATGWMTTINGKELKVEGQITYYNRYKRQNVVKDLSVELDRLSEESVNNDISSWTKGRSGEALSLLKKRFSHRPVQEKFVCLNCGFETHA

SEQ ID NO: 55 - protein, 977 aa, Artificial Sequence
  CasX Variant
MQEIKRINKIRRRLVKDSNTKKAGKTGPMKTLLVRVMTPDLRERLENLRKKPENIPQPISNNAANNLRMLLDDYTKMKEAILQVYWQEFKDDHVGLMCKFAQPAPKNIDQRKLIPVKDGNERLTSSGFACSQCCQPLYVYKLEQVNDKGKPHTNYFGRCNVSEHERLILLSPHKPEANDELVTYSLGKFGQRALDFYSIHVTKESTHPVKPLAQIAGNRYASGPVGKALSDACMGTIASFLSKYQDIIIEHQKVVKGNQKRLESLRELAGKENLEYPSVTLPPQPHTKEGVDAYNEVIARVRMWVNLNLWQKLKLSRDDAKPLLRLKGFPSFPLVERQANEVDWWDMVCNVKKLINEKKEDGKVFWQNLAGYKRQEALRPYLSSEEDRKKGKKFARYQFGDLLLHLEKKHGEDWGKVYDEAWERIDKKVEGLSKHIKLEEERRSEDAQSKAALTDWLRAKASFVIEGLKEADKDEFCRCELKLQKWYGDLRGKPFAIEAENSILDISGFSKQYNCAFIWQKDGVKKLNLYLIINYFKGGKLRFKKIKPEAFEANRFYTVINKKSGEIVPMEVNFNFDDPNLIILPLAFGKRQGREFIWNDLLSLETGSLKLANGRVIEKTLYNRRTRQDEPALFVALTFERREVLDSSNIKPMNLIGIDRGENIPAVIALTDPEGCPLSRFKDSLGNPTHILRIGESYKEKQRTIQAKKEVEQRRAGGYSRKYASKAKNLADDMVRNTARDLLYYAVTQDAMLIFENLSRGFGRQGKRTFMAERQYTRMEDWLTAKLAYEGLSKTYLSKTLAQYTSKTCSNCGFTITSADYDRVLEKLKKTATGWMTTINGKELKVEGQITYYNRYKRQNVVKDLSVELDRLSEESVNNDISSWTKGRSGEALSLLKKRFSHRPVQEKFVCLNCGFETHADEQAALNIARSWLFLRSQEYKKYQTNKTTGNTDKRAFVETWQSFYRKKLKEVWKPAV

SEQ ID NO: 56 - protein, 986 aa, Artificial Sequence
  CasX Variant
MQEIKRINKIRRRLVKDSNTKKAGKTGPMKTLLVRVMTPDLRERLENLRKKPENIPQPISNTSRANLNKLLTDYTEMKKAILHVYWEEFQKDPVGLMSRVAQPAPKNIDQRKLIPVKDGNERLTSSGFACSQCCQPLYVYKLEQVNDKGKPHTNYFGRCNVSEHERLILLSPHKPEANDELVTYSLGKFGQRALDFYSIHVTRESNHPVKPLEQIGGNSCASGPVGKALSDACMGAVASFLTKYQDIILEHQKVIKKNEKRLANLKDIASANGLAFPKITLPPQPHTKEGIEAYNNVVAQIVIWVNLNLWQKLKIGRDEAKPLQRLKGFPSFPVVERRENEVDWWNTINEVKKLIDAKRDMGRVFWSGVTAEKRNTILEGYNYLPNENDHKKREGSLENPKKPAKRQFGDLLLYLEKKYAGDWGKVFDEAWERIDKKIAGLTSHIEREEARNAEDAQSKAVLTDWLRAKASFVLERLKEMDEKEFYACEIQLQKWYGDLRGNPFAVEAENSILDISGFSKQYNCAFIWQKDGVKKLNLYLIINYFKGGKLRFKKIKPEAFEANRFYTVINKKSGEIVPMEVNFNFDDPNLIILPLAFGKRQGREFIWNDLLSLETGSLKLANGRVIEKTLYNRRTRQDEPALFVALTFERREVLDSSNIKPMNLIGIDRGENIPAVIALTDPEGCPLSRFKDSLGNPTHILRIGESYKEKQRTIQAKKEVEQRRAGGYSRKYASKAKNLADDMVRNTARDLLYYAVTQDAMLIFENLSRGFGRQGKRTFMAERQYTRMEDWLTAKLAYEGLSKTYLSKTLAQYTSKTCSNCGFTITSADYDRVLEKLKKTATGWMTTINGKELKVEGQITYYNRYKRQNVVKDLSVELDRLSEESVNNDISSWTKGRSGEALSLLKKRFSHRPVQEKFVCLNCGFETHADEQAALNIARSWLFLRSQEYKKYQTNKTTGNTDKRAFVETWQSFYRKKLKEVWKPAV

SEQ ID NO: 57 - protein, 925 aa, Artificial Sequence
  CasX Variant
MISNTSRANLNKLLTDYTEMKKAILHVYWEEFQKDPVGLMSRVAQPAPKNIDQRKLIPVKDGNERLTSSGFACSQCCQPLYVYKLEQVNDKGKPHTNYFGRCNVSEHERLILLSPHKPEANDELVTYSLGKFGQRALDFYSIHVTRESNHPVKPLEQIGGNSCASGPVGKALSDACMGAVASFLTKYQDIILEHQKVIKKNEKRLANLKDIASANGLAFPKITLPPQPHTKEGIEAYNNVVAQIVIWVNLNLWQKLKIGRDEAKPLQRLKGFPSFPLVERQANEVDWWDMVCNVKKLINEKKEDGKVFWQNLAGYKRQEALRPYLSSEEDRKKGKKFARYQFGDLLLHLEKKHGEDWGKVYDEAWERIDKKVEGLSKHIKLEEERRSEDAQSKAALTDWLRAKASFVIEGLKEADKDEFCRCELKLQKWYGDLRGKPFAIEAENRVVDISGFSIGSDGHSIQYRNLLAWKYLENGKREFYLLMNYGKKGRIRFTDGTDIKKSGKWQGLLYGGGKAKVIDLTFDPDDEQLIILPLAFGTRQGREFIWNDLLSLETGLIKLANGRVIEKTIYNKKIGRDEPALFVALTFERREVVDPSNIKPMNLIGIDRGENIPAVIALTDPEGCPLSRFKDSLGNPTHILRIGESYKEKQRTIQAKKEVEQRRAGGYSRKYASKAKNLADDMVRNTARDLLYYAVTQDAMLIFENLSRGFGRQGKRTFMAERQYTRMEDWLTAKLAYEGLSKTYLSKTLAQYTSKTCSNCGFTITSADYDRVLEKLKKTATGWMTTINGKELKVEGQITYYNRYKRQNVVKDLSVELDRLSEESVNNDISSWTKGRSGEALSLLKKRFSHRPVQEKFVCLNCGFETHADEQAALNIARSWLFLRSQEYKKYQTNKTTGNTDKRAFVETWQSFYRKKLKEVWKPAV

SEQ ID NO: 58 - protein, 975 aa, Artificial Sequence
  CasX Variant
MEKRINKIRKKLSADNATKPVSRSGPMKTLLVRVMTDDLKKRLEKRRKKPEVMPQVISNTSRANLNKLLTDYTEMKKAILHVYWEEFQKDPVGLMSRVAQPAPKNIDQRKLIPVKDGNERLTSSGFACSQCCQPLYVYKLEQVNDKGKPHTNYFGRCNVSEHERLILLSPHKPEANDELVTYSLGKFGQRALDFYSIHVTRESNHPVKPLEQIGGNSCASGPVGKALSDACMGAVASFLTKYQDIILEHQKVIKKNEKRLANLKDIASANGLAFPKITLPPQPHTKEGIEAYNNVVAQIVIWVNLNLWQKLKIGRDEAKPLQRLKGFPSFPLVERQANEVDWWDMVCNVKKLINEKKEDGKVFWQNLAGYKRQEALRPYLSSEEDRKKGKKFARYQFGDLLLHLEKKHGEDWGKVYDEAWERIDKKVEGLSKHIKLEEERRSEDAQSKAALTDWLRAKASFVIEGLKEADKDEFCRCELKLQKWYGDLRGKPFAIEAENSILDISGFSKQYNCAFIWQKDGVKKLNLYLIINYFKGGKLRFKKIKPEAFEANRFYTVINKKSGEIVPMEVNFNFDDPNLIILPLAFGKRQGREFIWNDLLSLETGSLKLANGRVIEKTLYNRRTRQDEPALFVALTFERREVLDSSNIKPMNLIGIDRGENIPAVIALTDPEGCPLSRFKDSLGNPTHILRIGESYKEKQRTIQAKKEVEQRRAGGYSRKYASKAKNLADDMVRNTARDLLYYAVTQDAMLIFENLSRGFGRQGKRTFMAERQYTRMEDWLTAKLAYEGLSKTYLSKTLAQYTSKTCSNCGFTITSADYDRVLEKLKKTATGWMTTINGKELKVEGQITYYNRYKRQNVVKDLSVELDRLSEESVNNDISSWTKGRSGEALSLLKKRFSHRPVQEKFVCLNCGFETHADEQAALNIARSWLFLRSQEYKKYQTNKTTGNTDKRAFVETWQSFYRKKLKEVWKPAV

SEQ ID NO: 59 - protein, 982 aa, Artificial Sequence
  CasX Variant
MQEIKRINKIRRRLVKDSNTKKAGKTGPMKTLLVRVMTPDLRERLENLRKKPENIPQPISNTSRANLNKLLTDYTEMKKAILHVYWEEFQKDPVGLMSRVAQPAPKNIDQRKLIPVKDGNERLTSSGFACSQCCQPLYVYKLEQVNDKGKPHTNYFGRCNVSEHERLILLSPHKPEANDELVTYSLGKFGQRALDFYSIHVTRESNHPVKPLEQIGGNSCASGPVGKALSDACMGAVASFLTKYQDIILEHQKVIKKNEKRLANLKDIASANGLAFPKITLPPQPHTKEGIEAYNNVVAQIVIWVNLNLWQKLKIGRDEAKPLQRLKGFPSFPLVERQANEVDWWDMVCNVKKLINEKKEDGKVFWQNLAGYKRQEALRPYLSSEEDRKKGKKFARYQFGDLLLHLEKKHGEDWGKVYDEAWERIDKKVEGLSKHIKLEEERRSEDAQSKAALTDWLRAKASFVIEGLKEADKDEFCRCELKLQKWYGDLRGKPFAIEAENRVVDISGFSIGSDGHSIQYRNLLAWKYLENGKREFYLLMNYGKKGRIRFTDGTDIKKSGKWQGLLYGGGKAKVIDLTFDPDDEQLIILPLAFGTRQGREFIWNDLLSLETGLIKLANGRVIEKTIYNKKIGRDEPALFVALTFERREVVDPSNIKPMNLIGIDRGENIPAVIALTDPEGCPLSRFKDSLGNPTHILRIGESYKEKQRTIQAKKEVEQRRAGGYSRKYASKAKNLADDMVRNTARDLLYYAVTQDAMLIFENLSRGFGRQGKRTFMAERQYTRMEDWLTAKLAYEGLSKTYLSKTLAQYTSKTCSNCGFTITSADYDRVLEKLKKTATGWMTTINGKELKVEGQITYYNRYKRQNVVKDLSVELDRLSEESVNNDISSWTKGRSGEALSLLKKRFSHRPVQEKFVCLNCGFETHADEQAALNIARSWLFLRSQEYKKYQTNKTTGNTDKRAFVETWQSFYRKKLKEVWKPAV

SEQ ID NO: 60 - protein, 977 aa, Artificial Sequence
  CasX Variant
MQEIKRINKIRRRLVKDSNTKKAGKTGPMKTLLVRVMTPDLRERLENLRKKPENIPQPISNTSRANLNKLLTDYTEMKKAILHVYWEEFQKDPVGLMSRVAQPAPKNIDQRKLIPVKDGNERLTSSGFACSQCCQPLYVYKLEQVNDKGKPHTNYFGRCNVSEHERLILLSPHKPEANDELVTYSLGKFGQRALDFYSIHVTRESNHPVKPLEQIGGNSCASGPVGKALSDACMGAVASFLTKYQDIILEHQKVIKKNEKRLANLKDIASANGLAFPKITLPPQPHTKEGIEAYNNVVAQIVIWVNLNLWQKLKIGRDEAKPLQRLKGFPSFPLVERQANEVDWWDMVCNVKKLINEKKEDGKVFWQNLAGYKRQEALRPYLSSEEDRKKGKKFARYQFGDLLLHLEKKHGEDWGKVYDEAWERIDKKVEGLSKHIKLEEERRSEDAQSKAALTDWLRAKASFVIEGLKEADKDEFKRCELKLQKWYGDLRGKPFAIEAENSILDISGFSKQYNCAFIWQKDGVKKLNLYLIINYFKGGKLRFKKIKPEAFEANRFYTVINKKSGEIVPMEVNFNFDDPNLIILPLAFGKRQGREFIWNDLLSLETGSLKLANGRVIEKPLYNRRTRQDEPALFVALTFERREVLDSSNIKPMNLIGIDRGENIPAVIALTDPEGCPLSRFKDSLGNPTHILRIGESYKEKQRTIQAKKEVEQRRAGGYSRKYASKAKNLADDMVRNTARDLLYYAVTQDAMLIFENLSRGFGRQGKRTFMAERQYTRMEDWLTAKLAYEGLSKTYLSKTLAQYTSKTCSNCGFTITSADYDRVLEKLKKTATGWMTTINGKELKVEGQITYYNRYKRQNVVKDLSVELDRLSEESVNNDISSWTKGRSGEALSLLKKRFSHRPVQEKFVCLNCGFETHADEQAALNIARSWLFLRSQEYKKYQTNKTTGNTDKRAFVETWQSFYRKKLKEVWKPAV

SEQ ID NO: 61 - protein, 977 aa, Artificial Sequence
  CasX Variant
MQEIKRINKIRRRLVKDSNTKKAGKTGPMKTLLVRVMTPDLRERLENLRKKPENIPQPISNTSRANLNKLLTDYTEMKKAILHVYWEEFQKDPVGLMSRVAQPAPKNIDQRKLIPVKDGNERLTSSGFACSQCCQPLYVYKLEQVNDKGKPHTNYFGRCNVSEHERLILLSPHKPEANDELVTYSLGKFGQRALDFYSIHVTRESNHPVKPLEQIGGNSCASGPVGKALSDACMGAVASFLTKYQDIILEHQKVIKKNEKRLANLKDIASANGLAFPKITLPPQPHTKEGIEAYNNVVAQIVIWVNLNLWQKLKIGRDEAKPLQRLKGFPSFPLVERQANEVDWWDMVCNVKKLINEKKEDGKVFWQNLAGYKRQEALLPYLSSEEDRKKGKKFARYQFGDLLLHLEKKHGEDWGKVYDEAWERIDKKVEGLSKHIKLEEERRSEDAQSKAALTDWLRAKASFVIEGLKEADKDEFCRCELKLQKWYGDLRGKPFAIEAENSILDISGFSKQYNCAFIWQKDGVKKLNLYLIINYFKGGKLRFKKIKPEAFEANRFYTVINKKSGEIVPMEVNFNFDDPNLIILPLAFGKRQGREFIWNDLLSLETGSLKLANGRVIEKTLYNRRTRQDEPALFVALTFERREVLDSSNIKPMNLIGIDRGENIPAVIALTDPEGCPLSRFKDSLGNPTHILRIGESYKEKQRTIQAAKEVEQRRAGGYSRKYASKAKNLADDMVRNTARDLLYYAVTQDAMLIFENLSRGFGRQGKRTFAAERQYTRMEDWLTAKLAYEGLPSKTYLSKTLAQYTSKTCSNCGFTITSADYDRVLEKLKKTATGWMTTINGKELKVEGQITYYNRYKRQNVVKDLSVELDRLSEESVNNDISSWTKGRSGEALSLLKKRFSHRPVQEKFVCLNCGFETHADEQAALNIARSWLFLRSQEYKKYQTNKTTGNTDKRAFVETWQSFYRKKLKEVWKPA

SEQ ID NO: 62 - protein, 977 aa, Artificial Sequence
  CasX Variant
MQEIKRINKIRRRLVKDSNTKKAGKTGPMKTLLVRVMTPDLRERLENLRKKPENIPQPISNTSRANLNKLLTDYTEMKKAILHVYWEEFQKDPVGLMSRVAQPAPKNIDQRKLIPVKDGNERLTSSGFACSQCCQPLYVYKLEQVNDKGKPHTNYFGRCNVSEHERLILLSPHKPEANDELVTYSLGKFGQRALDFYSIHVTRESNHPVKPLEQIGGNSCASGPVGKALSDACMGAVASFLTKYQDIILEHQKVIKKNEKRLANLKDIASANGLAFPKITLPPQPHTKEGIEAYNNVVAQIVIWVNLNLWQKLKIGRDEAKPLQRLKGFPSFPLVERQANEVDWWDMVCNVKKLINEKKEDGKVFWQNLAGYKRQEALRPYLSSEEDRKKGKKFARYQFGDLLLHLEKKHGEDWGKVYDEAWERIDKKVEGLSKHIKLEEERRSEDAQSKAALTDWLRAKASFVIEGLKEADKDEFCRCELKLQKWYGDLRGKPFAIEAENSILDISGFSKQYNCAFIWQKDGVKKLNLYLIINYFKGGKLRFKKIKPEAFEANRFYTVINKKSGEIVPMEVNFNFDDPNLIILPLAFGKRQGREFIWNDLLSLETGSLKLANGRVIEKTLYNRRTRQDEPALFVALTFERREVLDSSNIKPMNLIGIDRGENIPAVIALTDPEGCPLSRFKDSLGNPTHILRIGESYKEKQRTIQAKKEVEQRRAGGYSRKYASKAKNLANDMVRNTARDLLYYAVTQDAMLIFENLSRGFGRQGKRTFMAERQYTRMEDWLTAKLAYEGLSKTYLSKTLAQYTSKTCSNCGFTITSADYDRVLEKLKKTATGWMTTINGKELKVEGQITYYNRYKRQNVVKDLSVELDRLSEESVNNDISSWTKGRSGEALSLLKKRFSHRPVQEKFVCLNCGFETHADEQAALNIARSWLFLRSQEYKKYQTNKTTGNTDKRAFVETWQSFYRKKLKEVWKPAV

SEQ ID NO: 63 - protein, 978 aa, Artificial Sequence
  CasX Variant
MQEIKRINKIRRRLVKDSNTKKAGKTGPMKTLLVRVMTPDLRERLENLRKKPENIPQPISNTSRANLNKLLTDYTEMKKAILHVYWEEFQKDPVGLMSRVAQPAPKNIDQRKLIPVKDGNERLTSSGFACSQCCQPLYVYKLEQVNDKGKPHTNYFGRCNVSEHERLILLSPHKPEANDELVTYSLGKFGQRALDFYSIHVTRESNHPVKPLEQIGGNSCASGPVGKALSDACMGAVASFLTKYQDIILEHQKVIKKNEKRLANLKDIASANGLAFPKITLPPQPHTKEGIEAYNNVVAQIVIWVNLNLWQKLKIGRDEAKPLQRLKGFPSFPLVERQANEVDWWDMVCNVKKLINEKKEDGKVFWQNLAGYKRQEALLPYLSSEEDRKKGKKFARYQFGDLLLHLEKKHGEDWGKVYDEAWERIDKKVEGLSKHIKLEEERRSEDAQSKAALTDWLRAKASFVIEGLKEADKDEFCRCELKLQKWYGDLRGKPFAIEAENSILDISGFSKQYNCAFIWQKDGVKKLNLYLIINYFKGGKLRFKKIKPEAFEANRFYTVINKKSGEIVPMEVNFNFDDPNLIILPLAFGKRQGREFIWNDLLSLETGSLKLANGRVIEKTLYNRRTRQDEPALFVALTFERREVLDSSNIKPMNLIGIDRGENIPAVIALTDPEGCPLSRFKDSLGNPTHILRIGESYKEKQRTIQAAKEVEQRRAGGYSRKYASKAKNLADDMVRNTARDLLYYAVTQDAMLIFENLSRGFGRQGKRTFMAERQYTRMEDQLTAKLAYEGLPSKTYLSKTLAQYTSKTCSNCGFTITSADYDRVLEKLKKTATGWMTTINGKELKVEGQITYYNRYKRQNVVKDLSVELDRLSEESVNNDISSWTKGRSGEALSLLKKRFSHRPVQEKFVCLNCGFETHADEQAALNIARSWLFLRSQEYKKYQTNKTTGNTDKRAFVETWQSFYRKKLKEVWKPAV

SEQ ID NO: 64 - protein, 978 aa, Artificial Sequence
  CasX Variant
MQEIKRINKIRRRLVKDSNTKKAGKTGPMKTLLVRVMTPDLRERLENLRKKPENIPQPISNTSRANLNKLLTDYTEMKKAILHVYWEEFQKDPVGLMSRVAQPAPKNIDQRKLIPVKDGNERLTSSGFACSQCCQPLYVYKLEQVNDKGKPHTNYFGRCNVSEHERLILLSPHKPEANDELVTYSLGKFGQRALDFYSIHVTRESNHPVKPLEQIGGNSCASGPVGKALSDACMGAVASFLTKYQDIILEHQKVIKKNEKRLANLKDIASANGLAFPKITLPPQPHTKEGIEAYNNVVAQIVIWVNLNLWQKLKIGRDEAKPLQRLKGFPSFPLVERQANEVDWWDMVCNVKKLINEKKEDGKVFWQNLAGYKRQEALLPYLSSEEDRKKGKKFARYQFGDLLLHLEKKHGEDWGKVYDEAWERIDKKVEGLSKHIKLEEERRSEDAQSKAALTDWLRAKASFVIEGLKEADKDEFCRCELKLQKWYGDLRGKPFAIEAENSILDISGFSKQYNCAFIWQKDGVKKLNLYLIINYFKGGKLRFKKIKPEAFEANRFYTVINKKSGEIVPMEVNFNFDDPNLIILPLAFGKRQGREFIWNDLLSLETGSLKLANGRVIEKTLYNRRTRQDEPALFVALTFERREVLDSSNIKPMNLIGIDRGENIPAVIALTDPEGCPLSRFKDSLGNPTHILRIGESYKEKQRTIQAAKEVEQRRAGGYSRKYASKAKNLADDMVRNTARDLLYYAVTQDAMLIFENLSRGFGRQGKRTFQAERQYTRMEDWLTAKLAYEGLPSKTYLSKTLAQYTSKTCSNCGFTITSADYDRVLEKLKKTATGWMTTINGKELKVEGQITYYNRYKRQNVVKDLSVELDRLSEESVNNDISSWTKGRSGEALSLLKKRFSHRPVQEKFVCLNCGFETHADEQAALNIARSWLFLRSQEYKKYQTNKTTGNTDKRAFVETWQSFYRKKLKEVWKPAV

SEQ ID NO: 65 - protein, 978 aa, Artificial Sequence
  CasX Variant
MQEIKRINKIRRRLVKDSNTKKAGKTGPMKTLLVRVMTPDLRERLENLRKKPENIPQPISNTSRANLNKLLTDYTEMKKAILHVYWEEFQKDPVGLMSRVAQPAPKNIDQRKLIPVKDGNERLTSSGFACSQCCQPLYVYKLEQVNDKGKPHTNYFGRCNVSEHERLILLSPHKPEANDELVTYSLGKFGQRALDFYSIHVTRESNHPVKPLEQIGGNSCASGPVGKALSDACMGAVASFLTKYQDIILEHQKVIKKNEKRLANLKDIASANGLAFPKITLPPQPHTKEGIEAYNNVVAQIVIWVNLNLWQKLKIGRDEAKPLQRLKGFPSFPLVERQANEVDWWDMVCNVKKLINEKKEDGKVFWQNLAGYKRQEALLPYLSSEEDRKKGKKFARYQFGDLLLHLEKKHGEDWGKVYDEAWERIDKKVEGLSKHIKLEEERRSEDAQSKAALTDWLIAKASFVIEGLKEADKDEFCRCELKLQKWYGDLRGKPFAIEAENSILDISGFSKQYNCAFIWQKDGVKKLNLYLIINYFKGGKLRFKKIKPEAFEANRFYTVINKKSGEIVPMEVNFNFDDPNLIILPLAFGKRQGREFIWNDLLSLETGSLKLANGRVIEKTLYNRRTRQDEPALFVALTFERREVLDSSNIKPMNLIGIDRGENIPAVIALTDPEGCPLSRFKDSLGNPTHILRIGESYKEKQRTIQAAKEVEQRRAGGYSRKYASKAKNLADDMVRNTVRDLLYYAVTQDAMLIFENLSRGFGRQGKRTFMAERQYTRMEDWLTAKLAYEGLPSKTYLSKTLAQYTSKTCSNCGFTITSADYDRVLEKLKKTATGWMTTINGKELKVEGQITYYNRYKRQNVVKDLSVELDRLSEESVNNDISSWTKGRSGEALSLLKKRFSHRPVQEKFVCLNCGFETHADEQAALNIARSWLFLRSQEYKKYQTNKTTGNTDKRAFVETWQSFYRKKLKEVWKPAV

SEQ ID NO: 66 - protein, 977 aa, Artificial Sequence
  CasX Variant
MQEIKRINKIRRRLVKDSNTKKAGKTGPMKTLLVRVMTPDLRERLENLRKKPENIPQPISNTSRANLNKLLTDYTEMKKAILHVYWEEFQKDPVGLMSRVAQPAPKNIDQRKLIPVKDGNERLTSSGFACSQCCQPLYVYKLEQVNDKGKPHTNYFGRCNVSEHERLILLSPHKPEANDELVTYSLGKFGQRALDFYSIHVTRESNHPVKPLEQIGGNSCASGPVGKALSDACMGAVASFLTKYQDIILEHQKVIKKNEKRLANLKDIASANGLAFPKITLPPQPHTKEGIEAYNNVVAQIVIWVNLNLWQKLKIGRDEAKPLQRLKGFPSFPLVERQANEVDWWDMVCNVKKLINEKKEDGKVFWQNLAGYKRQEALRPYLSSEEDRKKGKKFARYQFGDLLLHLEKKHGEDWGKVYDEAWERIDKKVEGLSKHIKLEEERRSEDAQSKAALTDWLRAKASFVIEGLKEADKDEFCRCELKLQKWYGDLRGKPFAIEAENSILDISGFSKQYNCAFIWQKDGVKKLNLYLIINYFKGGKLRFKKIKPEAFEANRFYTVINKKSGEIVPMEVNFNFDDPNLIILPLAFGKRQGREFIWNDLLSLETGSLKLANGRVIEKTLYNRRTRQDEPALFVALTFERREVLDSSNIKPMNLIGIDRGENIPAVIALTDPEGCPLSRFKDSLGNPTHILRIGESYKEKQRTIQAKKEVEQRRAGGYSRKYASKAKNLADDMVRNTARDLLYYAVTQDAMLIFENLSRGFGRQGKRTFNAERQYTRMEDWLTAKLAYEGLSKTYLSKTLAQYTSKTCSNCGFTITSADYDRVLEKLKKTATGWMTTINGKELKVEGQITYYNRYKRQNVVKDLSVELDRLSEESVNNDISSWTKGRSGEALSLLKKRFSHRPVQEKFVCLNCGFETHADEQAALNIARSWLFLRSQEYKKYQTNKTTGNTDKRAFVETWQSFYRKKLKEVWKPAV

SEQ ID NO: 67 - protein, 977 aa, Artificial Sequence
  CasX Variant
MQEIKRINKIRRRLVKDSNTKKAGKTGPMKTLLVRVMTPDLRERLENLRKKPENIPQPISNTSRANLNKLLTDYTEMKKAILHVYWEEFQKDPVGLMSRVAQPAPKNIDQRKLIPVKDGNERLTSSGFACSQCCQPLYVYKLEQVNDKGKPHTNYFGRCNVSEHERLILLSPHKPEANDELVTYSLGKFGQRALDFYSIHVTRESNHPVKPLEQIGGNSCASGPVGKALSDACMGAVASFLTKYQDIILEHQKVIKKNEKRLANLKDIASANGLAFPKITLPPQPHTKEGIEAYNNVVAQIVIWVNLNLWQKLKIGRDEAKPLQRLKGFPSFPLVERQANEVDWWDMVCNVKKLINEKKEDGKVFWQNLAGYKRQEALRPYLSSEEDRKKGKKFARYQFGDLLLHLEKKHGEDWGKVYDEAWERIDKKVEGLSKHIKLEEERRSEDAQSKAALTDWLRAKASFVIEGLKEADKDEFCRCELKLQKWYGDLRGKPFAIEAENSILDISGFSKQYNCAFIWQKDGVKKLNLYLIINYFKGGKLRFKKIKPEAFEANRFYTVINKKSGEIVPMEVNFNFDDPNLIILPLAFGKRQGREFIWNDLLSLETGSLKLANGRVIEKTLYNRRTRQDEPALFVALTFERREVLDSSNIKPMNLIGIDRGENIPAVIALTDPEGCPLSRFKDSLGNPTHILRIGESYKEKQRTIQAKKEVEQRRAGGYSRKYASKAKNLADDMVRNTTRDLLYYAVTQDAMLIFENLSRGFGRQGKRTFMAERQYTRMEDWLTAKLAYEGLSKTYLSKTLAQYTSKTCSNCGFTITSADYDRVLEKLKKTATGWMTTINGKELKVEGQITYYNRYKRQNVVKDLSVELDRLSEESVNNDISSWTKGRSGEALSLLKKRFSHRPVQEKFVCLNCGFETHADEQAALNIARSWLFLRSQEYKKYQTNKTTGNTDKRAFVETWQSFYRKKLKEVWKPAV

SEQ ID NO: 68 - protein, 977 aa, Artificial Sequence
  CasX Variant
MQEIKRINKIRRRLVKDSNTKKAGKTGPMKTLLVRVMTPDLRERLENLRKKPENIPQPISNTSRANLNKLLTDYTEMKKAILHVYWEEFQKDPVGLMSRVAQPAPKNIDQRKLIPVKDGNERLTSSGFACSQCCQPLYVYKLEQVNDKGKPHTNYFGRCNVSEHERLILLSPHKPEANDELVTYSLGKFGQRALDFYSIHVTRESNHPVKPLEQIGGNSCASGPVGKALSDACMGAVASFLTKYQDIILEHQKVIKKNEKRLANLKDIASANGLAFPKITLPPQPHTKEGIEAYNNVVAQIVIWVNLNLWQKLKIGRDEAKPLQRLKGFPSFPLVERQANEVDWWDMVCNVKKLINEKKEDGKVFWQNLAGYKRQEALRPYLSSEEDRKKGKKFARYQFGDLLLHLEKKHGEDWGKVYDEAWERIDKKVEGLSKHIKLEEERRSEDAQSKAALTDWLRAKASFVIEGLKEADKDEFKRCELKLQKWYGSLRGKPFAIEAENSILDISGFSKQYNCAFIWQKDGVKKLNLYLIINYFKGGKLRFKKIKPEAFEANRFYTVINKKSGEIVPMEVNFNFDDPNLIILPLAFGKRQGREFIWNDLLSLETGSLKLANGRVIEKTLYNRRTRQDEPALFVALTFERREVLDSSNIKPMNLIGIDRGENIPAVIALTDPEGCPLSRFKDSLGNPTHILRIGESYKEKQRTIQAKKEVEQRRAGGYSRKYASKAKNLADDMVRNTARDLLYYAVTQDAMLIFENLSRGFGRQGKRTFMAERQYTRMEDWLTAKLAYEGLSKTYLSKTLAQYTSKTCSNCGFTITSADYDRVLEKLKKTATGWMTTINGKELKVEGQITYYNRYKRQNVVKDLSVELDRLSEESVNNDISSWTKGRSGEALSLLKKRFSHRPVQEKFVCLNCGFETHADEQAALNIARSWLFLRSQEYKKYQTNKTTGNTDKRAFVETWQSFYRKKLKEVWKPAV

SEQ ID NO: 69 - protein, 977 aa, Artificial Sequence
  CasX Variant
MQEIKRINKIRRRLVKDSNTKKAGKTGPMKTLLVRVMTPDLRERLENLRKKPENIPQPISNTSRANLNKLLTDYTEMKKAILHVYWEEFQKDPVGLMSRVAQPAPKNIDQRKLIPVKDGNERLTSSGFACSQCCQPLYVYKLEQVNDKGKPHTNYFGRCNVSEHERLILLSPHKPEANDELVTYSLGKFGQRALDFYSIHVTRESNHPVKPLEQIGGNSCASGPVGKALSDACMGAVASFLTKYQDIILEHQKVIKKNEKRLANLKDIASANGLAFPKITLPPQPHTKEGIEAYNNVVAQIVIWVNLNLWQKLKIGRDEAKPLQRLKGFPSFPLVERQANEVDWWDMVCNVKKLINEKKEDGKVFWQNLAGYKRQEALRPYLSSEEDRKKGKKFARYQFGDLLLHLEKKHGEDWGKVYDEAWERIDKKVEGLSKHIKLEEERRSEDAQSKAALTDWLRAKASFVIEGLKEADKDEFKRCELKLQKWYGDLRGKPFAIEAENSILDISGFSKQYNCAFIWQKDGVKKLNLYLIINYFKGGKLRFKKIKPEAFEANRFYTVINKKSGEIVPMEVNFNFDDPNLIILPLAFGKRQGREFIWNDLLSLETGSLKLANGRVIEKTLYNRRTRQDEPALFVALTFERREVLDSSNIKPMNLIGIDRGENIPAVIALTDPEGCPLSRFKDSLGNPTHILRIGESYKEKQRTIQAKKEVEQRRAGGYSRKYASKAKNLANDMVRNTARDLLYYAVTQDAMLIFENLSRGFGRQGKRTFMAERQYTRMEDWLTAKLAYEGLSKTYLSKTLAQYTSKTCSNCGFTITSADYDRVLEKLKKTATGWMTTINGKELKVEGQITYYNRYKRQNVVKDLSVELDRLSEESVNNDISSWTKGRSGEALSLLKKRFSHRPVQEKFVCLNCGFETHADEQAALNIARSWLFLRSQEYKKYQTNKTTGNTDKRAFVETWQSFYRKKLKEVWKPAV

SEQ ID NO: 70 - protein, 978 aa, Artificial Sequence
  CasX Variant
MQEIKRINKIRRRLVKDSNTKKAGKTGPMKTLLVRVMTPDLRERLENLRKKPENIPQPISNTSRANLNKLLTDYTEMKKAILHVYWEEFQKDPVGLMSRVAQPAPKNIDQRKLIPVKDGNERLTSSGFACSQCCQPLYVYKLEQVNDKGKPHTNYFGRCNVSEHERLILLSPHKPEANDELVTYSLGKFGQRALDFYSIHVTRESNHPVKPLEQIGGNSCASGPVGKALSDACMGAVASFLTKYQDIILEHQKVIKKNEKRLANLKDIASANGLAFPKITLPPQPHTKEGIEAYNNVVAQIVIWVNLNLWQKLKIGRDEAKPLQRLKGFPSFPLVERQANEVDWWDMVCNVKKLINEKKEDGKVFWQNLAGYKRQEALLPYLSSEEDRKKGKKFARYQFGDLLLHLEKKHGEDWGKVYDEAWERIDKKVEGLSKHIKLEEERRSEDAQSKAALTDWLRAKASFVIEGLKEADKDEFCRCELKLQKWYGDLRGKPFAIEAENSILDISGFSKQYNCAFIWQKDGVKKLNLYLIINYFKGGKLRFKKIKPEAFEANRFYTVINKKSGEIVPMEVNFNFDDPNLIILPLAFGKRQGREFIWNDLLSLETGSLKLANGRVIEKTLYNRRTRQDEPALFVALTFERREVLDSSNIKPMNLIGIDRGENIPAVIALTDPEGCPLSRFKDSLGNPTHILRIGESYKEKQRTIQAAKEKEQRRAGGYSRKYASKAKNLADDMVRNTARDLLYYAVTQDAMLIFENLSRGFGRQGKRTFMAERQYTRMEDWLTAKLAYEGLPSKTYLSKTLAQYTSKTCSNCGFTITSADYDRVLEKLKKTATGWMTTINGKELKVEGQITYYNRYKRQNVVKDLSVELDRLSEESVNNDISSWTKGRSGEALSLLKKRFSHRPVQEKFVCLNCGFETHADEQAALNIARSWLFLRSQEYKKYQTNKTTGNTDKRAFVETWQSFYRKKLKEVWKPAV

SEQ ID NO: 71 - protein, 977 aa, Artificial Sequence
  CasX Variant
MQEIKRINKIRRRLVKDSNTKKAGKTGPMKTLLVRVMTPDLRERLENLRKKPENIPQPISNTSRANLNKLLTDYTEMKKAILHVYWEEFQKDPVGLMSRVAQPAPKNIDQRKLIPVKDGNERLTSSGFACSQCCQPLYVYKLEQVNDKGKPHTNYFGRCNVSEHERLILLSPHKPEANDELVTYSLGKFGQRALDFYSIHVTRESNHPVKPLEQIGGNSCASGPVGKALSDACMGAVASFLTKYQDIILEHQKVIKKNEKRLANLKDIASANGLAFPKITLPPQPHTKEGIEAYNNVVAQIVIWVNLNLWQKLKIGRDEAKPLQRLKGFPSFPLVERQANEVDWWDMVCNVKKLINEKKEDGKVFWQNLAGYKRQEALRPYLSSEEDRKKGKKFARYQFGDLLLHLEKKHGEDWGKVYDEAWERIDKKVEGLSKHIKLEEERRSEDAQSKAALTDWLRAKASFVIEGLKEADKDEFKRCELKLQKWYGDLRGKPFAIEAENSILDISGFSKQYNCAFIWQKDGVKKLNLYLIINYFKGGKLRFKKIKPEAFEANRFYTVINKKSGEIVPMEVNFNFDDPNLIILPLAFGKRQGREFIWNDLLSLETGSLKLANGRVIEKTLYNRRTRQDEPALFVALTFERREVLDSSNIKPMNLIGIDRGENIPAVIALTDPEGCPLSRFKDSLGNPTHILRIGESYKEKQRTIQAKKEVEQRRAGGYSRKYASKAKNLADDMVRNTARDLLYYAVTQDAMLIFENLSRGFGRQGKRTFMAERQYTRMEDWLTAKLAYEGLSKTLLSKTLAQYTSKTCSNCGFTITSADYDRVLEKLKKTATGWMTTINGKELKVEGQITYYNRYKRQNVVKDLSVELDRLSEESVNNDISSWTKGRSGEALSLLKKRFSHRPVQEKFVCLNCGFETHADEQAALNIARSWLFLRSQEYKKYQTNKTTGNTDKRAFVETWQSFYRKKLKEVWKPAV

SEQ ID NO: 72 - protein, 977 aa, Artificial Sequence
  CasX Variant
MQEIKRINKIRRRLVKDSNTKKAGKTGPMKTLLVRVMTPDLRERLENLRKKPENIPQPISNTSRANLNKLLTDYTEMKKAILHVYWEEFQKDPVGLMSRVAQPAPKNIDQRKLIPVKDGNERLTSSGFACSQCCQPLYVYKLEQVNDKGKPHTNYFGRCNVSEHERLILLSPHKPEANDELVTYSLGKFGQRALDFYSIHVTRESNHPVKPLEQIGGNSCASGPVGKALSDACMGAVASFLTKYQDIILEHQKVIKKNEKRLANLKDIASANGLAFPKITLPPQPHTKEGIEAYNNVVAQIVIWVNLNLWQKLKIGRDEAKPLQRLKGFPSFPLVERQANEVDWWDMVCNVKKLINEKKEDGKVFWQNLAGYKRQEALRPYLSSEEDRKKGKKFARYQFGDLLLHLEKKHGEDWGKVYDEAWERIDKKVEGLSKHIKLEEERRSEDAQSKAALTDWLRAKASFVIEGLKEADKDEFCRCELKLQKWYGDLRGKPFAIEAENSILDISGFSKQYNCAFIWQKDGVKKLNLYLIINYFKGGKLRFKKIKPEAFEANRFYTVINKKSGEIVPMEVNFNFDDPNLIILPLAFGKRQGREFIWNDLLSLETGSLKLANGRVIEKTLYNRRTRQDEPALFVALTFERREVLDSSNIKPMNLIGIDRGENIPAVIALTDPEGCPLSRFKDSLGNPTHILRIGESYKEKQRTIQAKKEVEQRRAGGYSRKYASKAKNLADDMVRNTARDLLYYAVTQDAMLIFENLSRGFGRQGKRTFMAERQYTRMEDWLTAKLAYEGLSKTYLSKTLAQYTSKTCSNCGFTITSADYDRVLEKLKKTATGWMTTINGKELKVEGQITYYNRYKRQNVVKDLSVELDRLSEESVNNDISSWTKGRSGEALSLLKKRFSHRPVQEKFVCLNCGFETHADEQAALNIARSWLFLRSQEYKKYQTNKTTGNTDKRAFVETWQSFYRKKLKEVWKPAV

SEQ ID NO: 73 - protein, 977 aa, Artificial Sequence
  CasX Variant
MQEIKRINKIRRRLVKDSNTKKAGKTGPMKTLLVRVMTPDLRERLENLRKKPENIPQPISNTSRANLNKLLTDYTEMKKAILHVYWEEFQKDPVGLMSRVAQPAPKNIDQRKLIPVKDGNERLTSSGFACSQCCQPLYVYKLEQVNDKGKPHTNYFGRCNVSEHERLILLSPHKPEANDELVTYSLGKFGQRALDFYSIHVTRESNHPVKPLEQIGGNSCASGPVGKALSDACMGAVASFLTKYQDIILEHQKVIKKNEKRLANLKDIASANGLAFPKITLPPQPHTKEGIEAYNNVVAQIVIWVNLNLWQKLKIGRDEAKPLQRLKGFPSFPLVERQANEVDWWDMVCNVKKLINEKKEDGKVFWQNLAGYKRQEALRPYLSSEEDRKKGKKFARYQFGDLLLHLEKKHGEDWGKVYDEAWERIDKKVEGLSKHIKLEEERRSEDAQSKAALTDWLRAKASFVIEGLKEADKDEFKRCELKLQKWYGDLRGKPFAIEAENSILDISGFSKQYNCAFIWQKDGVKKLNLYLIINYFKGGKLRFKKIKPEAFEANRFYTVINKKSGEIVPMEVNFNFDDPNLIILPLAFGKRQGREFIWNDLLSLETGSLKLANGRVIEKTLYNRRTRQDEPALFVALTFERREVLDSSNIKPMNLIGIDRGENIPAVIALTDPEGCPLSRFKDSLGNPTHILRIGESYKEKQRTIQAKKEVEQRRAGGYSRKYASKAKNLADDMVRNTARDLLYYAVTQDAMLIFENLSRGFGRQGKRTFNAERQYTRMEDWLTAKLAYEGLSKTYLSKTLAQYTSKTCSNCGFTITSADYDRVLEKLKKTATGWMTTINGKELKVEGQITYYNRYKRQNVVKDLSVELDRLSEESVNNDISSWTKGRSGEALSLLKKRFSHRPVQEKFVCLNCGFETHADEQAALNIARSWLFLRSQEYKKYQTNKTTGNTDKRAFVETWQSFYRKKLKEVWKPAV

SEQ ID NO: 74 - protein, 977 aa, Artificial Sequence
  CasX Variant
MQEIKRINKIRRRLVKDSNTKKAGKTGPMKTLLVRVMTPDLRERLENLRKKPENIPQPISNTSRANLNKLLTDYTEMKKAILHVYWEEFQKDPVGLMSRVAQPAPKNIDQRKLIPVKDGNERLTSSGFACSQCCQPLYVYKLEQVNDKGKPHTNYFGRCNVSEHERLILLSPHKPEANDELVTYSLGKFGQRALDFYSIHVTRESNHPVKPLEQIGGNSCASGPVGKALSDACMGAVASFLTKYQDIILEHQKVIKKNEKRLANLKDIASANGLAFPKITLPPQPHTKEGIEAYNNVVAQIVIWVNLNLWQKLKIGRDEAKPLQRLKGFPSFPLVERQANEVDWWDMVCNVKKLINEKKEDGKVFWQNLAGYKRQEALLPYLSSESDRKKGKKFARYQFGDLLLHLEKKHGEDWGKVYDEAWERIDKKVEGLSKHIKLEEERRSEDAQSKAALTDWLRAKASFVIEGLKEADKDEFCRCELKLQKWYGDLRGKPFAIEAENSILDISGFSKQYNCAFIWQKDGVKKLNLYLIINYFKGGKLRFKKIKPEAFEANRFYTVINKKSGEIVPMEVNFNFDDPNLIILPLAFGKRQGREFIWNDLLSLETGSLKLANGRVIEKTLYNRRTRQDEPALFVALTFERREVLDSSNIKPMNLIGIDRGENIPAVIALTDPEGCPLSRFKDSLGNPTHILRIGESYKEKQRTIQAKKEVEQRRAGGYSRKYASKAKNLADDMVRNTARDLLYYAVTQDAMLIFENLSRGFGRQGKRTFMAERQYTRMEDWLTAKLAYEGLSKTYLSKTLAQYTSKTCSNCGFTITSADYDRVLEKLKKTATGWMTTINGKELKVEGQITYYNRYKRQNVVKDLSVELDRLSEESVNNDISSWTKGRSGEALSLLKKRFSHRPVQEKFVCLNCGFETHADEQAALNIARSWLFLRSQEYKKYQTNKTTGNTDKRAFVETWQSFYRKKLKEVWKPAV

SEQ ID NO: 75 - protein, 977 aa, Artificial Sequence
  CasX Variant
MQEIKRINKIRRRLVKDSNTKKAGKTGPMKTLLVRVMTPDLRERLENLRKKPENIPQPISNTSRANLNKLLTDYTEMKKAILHVYWEEFQKDPVGLMSRVAQPAPKNIDQRKLIPVKDGNERLTSSGFACSQCCQPLYVYKLEQVNDKGKPHTNYFGRCNVSEHERLILLSPHKPEANDELVTYSLGKFGQRALDFYSIHVTRESNHPVKPLEQIGGNSCASGPVGKALSDACMGAVASFLTKYQDIILEHQKVIKKNEKRLANLKDIASANGLAFPKITLPPQPHTKEGIEAYNNVVAQIVIWVNLNLWQKLKIGRDEAKPLQRLKGFPSFPLVERQANEVDWWDMVCNVKKLINEKKEDGKVFWQNLAGYKRQEALRPYLSSEEDRKKGKKFARYQFGDLLLHLEKKHGEDWGKVYDEAWERIDKKVEGLSKHIKLEEERRSEDAQSKAALTDWLRAKASFVIEGLKEADKDEFKRCELKLQKWYGDLRGKPFAIEAENSILDISGFSKQYNCAFIWQKDGVKKLNLYLIINYFKGGKLRFKKIKPEAFEANRFYTVINKKSGEIVPMEVNFNFDDPNLIILPLAFGKRQGREFIWNDLLSLETGSLKLANGRVIEKTLYNRRTRQDEPALFVALTFERREVLDSSNIKPMNLIGIDRGENIPAVIALTDPEGCPLSRFKDSLGNPTHILRIGESYKEKQRTIQAKKEVEQRRAGGYSRKYASKAKNLADDMVRNTARDLLYYAVTQDAMLIFENLSRGFGRQGKRTFMAERQYTRMEDWLTAKLAYEGLSKTYLSKTLAQYTSKTCSNCGFTITSADYDRVLEKLKKTATGWMTTINGKELKVEGQITYYNRYKRQNVVKDLSVELDRLSEESVNNDISSWTKGRSGEALSLLKKRFSHRPVQEKFVCLNCGFETHADEQAALNIARSWLFLRSQEYKKYQTNKTTGNTDKRAFVETWQSFYRKKLKEVWKPAV

SEQ ID NO: 76 - protein, 978 aa, Artificial Sequence
  CasX Variant
MQEIKRINKIRRRLVKDSNTKKAGKTGPMKTLLVRVMTPDLRERLENLRKKPENIPQPISNTSRANLNKLLTDYTEMKKAILHVYWEEFQKDPVGLMSRVAQPAPKNIDQRKLIPVKDGNERLTSSGFACSQCCQPLYVYKLEQVNDKGKPHTNYFGRCNVSEHERLILLSPHKPEANDELVTYSLGKFGQRALDFYSIHVTRESNHPVKPLEQIGGNSCASGPVGKALSDACMGAVASFLTKYQDIILEHQKVIKKNEKRLANLKDIASANGLAFPKITLPPQPHTKEGIEAYNNVVAQIVIWVNLNLWQKLKIGRDEAKPLQRLKGFPSFPLVERQANEVDWWDMVCNVKKLINEKKEDGKVFWQNLAGYKRQEALLPYLSSEEDRKKGKKFARYQFGDLLLHLEKKHGEDWGKVYDEAWERIDKKVEGLSKHIKLEEERRSEDAQSKAALTDWLRAKASFVIEGLKEADKDEFCRCELKLQKWYGDLRGKPFAIEAENSILDISGFSKQYNCAFIWQKDGVKKLNLYLIINYFKGGKLRFKKIKPEAFEANRFYTVINKKSGEIVPMEVNFNFDDPNLIILPLAFGKRQGREFIWNDLLSLETGSLKLANGRVIEKTLYNRRTRQDEPALFVALTFERREVLDSSNIKPMNLIGIDRGENIPAVIALTDPEGCPLSRFKDSLGNPTHILRIGESYKEKQRTIQAAKEVEQRRAGGYSRKYASKAKNLADDMVRNTARDLLYYAVTQDAMLIFENLSRGFGRQGKRTFMAERQYTRMEDWLTAKLAYEGDPSKTYLSKTLAQYTSKTCSNCGFTITSADYDRVLEKLKKTATGWMTTINGKELKVEGQITYYNRYKRQNVVKDLSVELDRLSEESVNNDISSWTKGRSGEALSLLKKRFSHRPVQEKFVCLNCGFETHADEQAALNIARSWLFLRSQEYKKYQTNKTTGNTDKRAFVETWQSFYRKKLKEVWKPAV

SEQ ID NO: 77 - protein, 978 aa, Artificial Sequence
  CasX Variant
MQEIKRINKIRRRLVKDSNTKKAGKTGPMKTLLVRVMTPDLRERLENLRKKPENIPQPISNTSRANLNKLLTDYTEMKKAILHVYWEEFQKDPVGLMSRVAQPAPKNIDQRKLIPVKDGNERLTSSGFACSQCCQPLYVYKLEQVNDKGKPHTNYFGRCNVSEHERLILLSPHKPEANDELVTYSLGKFGQRALDFYSIHVTRESNHPVKPLEQIGGNSCASGPVGKALSDACMGAVASFLTKYQDIILEHQKVIKKNEKRLANLKDIASANGLAFPKITLPPQPHTKEGIEAYNNVVAQIVIWVNLNLWQKLKIGRDEAKPLQRLKGFPSFPLVERQANEVDWWDMVCNVKKLINEKKEDGKVFWQNLAGYKRQEALLPYLSSEEDRKKGKKFARYQFGDLLLHLEKKHGEDWGKVYDEAWERIDKKVEGLSKHIKLEEERRSEDAQSKAALTDWLRAKASFVIEGLKEADKDEFCRCELKLQKWYGDLRGKPFAIEAENSILDISGFSKQYNCAFIWQKDGVKKLNLYLIINYFKGGKLRFKKIKPEAFEANRFYTVINKKSGEIVPMEVNFNFDDPNLIILPLAFGKRQGREFIWNDLLSLETGSLKLANGRVIEKTLYNRRTRQDEPALFVALTFERREVLDSSNIKPMNLIGIDRGENIPAVIALTDPEGCPLSRFKDSLGNPTHILRIGESYKEKQRTIQAAKEVEQRRAGGYSRKYASKAKNLADDMVRNTARDLLYYAVTQDAMLIFENLSRGFGRQGKRTFMAERQYTRMEDWLTAKLAYEFLPSKTYLSKTLAQYTSKTCSNCGFTITSADYDRVLEKLKKTATGWMTTINGKELKVEGQITYYNRYKRQNVVKDLSVELDRLSEESVNNDISSWTKGRSGEALSLLKKRFSHRPVQEKFVCLNCGFETHADEQAALNIARSWLFLRSQEYKKYQTNKTTGNTDKRAFVETWQSFYRKKLKEVWKPAV

SEQ ID NO: 78 - protein, 977 aa, Artificial Sequence
  CasX Variant
MQEIKRINKIRRRLVKDSNTKKAGKTGPMKTLLVRVMTPDLRERLENLRKKPENIPQPISNTSRANLNKLLTDYTEMKKAILHVYWEEFQKDPVGLMSRVAQPAPKNIDQRKLIPVKDGNERLTSSGFACSQCCQPLYVYKLEQVNDKGKPHTNYFGRCNVSEHERLILLSPHKPEANDELVTYSLGKFGQRALDFYSIHVTRESNHPVKPLEQIGGNSCASGPVGKALSDACMGAVASFLTKYQDIILEHQKVIKKNEKRLANLKDIASANGLAFPKITLPPQPHTKEGIEAYNNVVAQIVIWVNLNLWQKLKIGRDEAKPLQRLKGFPSFPLVERQANEVDWWDMVCNVKKLINEKKEDGKVFWQNLAGYKRQEALLPYLSSEEDRKKGKKFARYQFGDLLLHLEKKHGEDWGKVYDEAWERIDKKVEGLSKHIKLEEERRSEDAQSKAALTDWLRAKASFVIEGLKEADKDEFCRCELKLQKWYGDLRGKPFAIEAENSILDISGFSKQYNCAFIWQKDGVKKLNLYLIINYFKGGKLRFKKIKPEAFEANRFYTVINKKSGEIVPMEVNFNFDDPNLIILPLAFGKRQGREFIWNDLLSLETGSLKLANGRVIEKTLYNRRTRQDEPALFVALTFERREVLDSSNIKPMNLIGIDRGENIPAVIALTDPEGCPLSRFKDSLGNPTHILRIGESYKEKQRTIQAKKEVEQRRAGGYSRKYASKAKNLADDMVRNTVRDLLYYAVTQDAMLIFENLSRGFGRQGKRTFMAERQYTRMEDWLTAKLAYEGLSKTYLSKTLAQYTSKTCSNCGFTITSADYDRVLEKLKKTATGWMTTINGKELKVEGQITYYNRYKRQNVVKDLSVELDRLSEESVNNDISSWTKGRSGEALSLLKKRFSHRPVQEKFVCLNCGFETHADEQAALNIARSWLFLRSQEYKKYQTNKTTGNTDKRAFVETWQSFYRKKLKEVWKPAV

SEQ ID NO: 79 - protein, 977 aa, Artificial Sequence
  CasX Variant
MQEIKRINKIRRRLVKDSNTKKAGKTGPMKTLLVRVMTPDLRERLENLRKKPENIPQPISNTSRANLNKLLTDYTEMKKAILHVYWEEFQKDPVGLMSRVAQPAPKNIDQRKLIPVKDGNERLTSSGFACSQCCQPLYVYKLEQVNDKGKPHTNYFGRCNVSEHERLILLSPHKPEANDELVTYSLGKFGQRALDFYSIHVTRESNHPVKPLEQIGGNSCASGPVGKALSDACMGAVASFLTKYQDIILEHQKVIKKNEKRLANLKDIASANGLAFPKITLPPQPHTKEGIEAYNNVVAQIVIWVNLNLWQKLKIGRDEAKPLQRLKGFPSFPLVERQANEVDWWDMVCNVKKLINEKKEDGKVFWQNLAGYKRQEALRPYLSSEEDRKKGKKFARYQFGDLLLHLEKKHGEDWGKVYDEAWERIDKKVEGLSKHIKLEEERRSEDAQSKAALTDWLRAKASFVIEGLKEADKDEFCRCELKLQKWYGDLRGKPFAIEAENSILDISGFSKQYNCAFIWQKDGVKKLNLYLIINYFKGGKLRFKKIKPEAFEANRFYTVINKKSGEIVPMEVNFNFDDPNLIILPLAFGKRQGREFIWNDLLSLETGSLKLANGRVIEKTLYNRRTRQDEPALFVALTFERREVLDSSNIKPMNLIGIDRGENIPAVIALTDPEGCPLSRFKDSLGNPTHILRIGESYKEKQRTIQAKKEVEQRRAGGYSRKYASKAKNLADDMVRNTVRDLLYYAVTQDAMLIFENLSRGFGRQGKRTFMAERQYTRMEDWLTAKLAYEGLSKTYLSKTLAQYTSKTCSNCGFTITSADYDRVLEKLKKTATGWMTTINGKELKVEGQITYYNRYKRQNVVKDLSVELDRLSEESVNNDISSWTKGRSGEALSLLKKRFSHRPVQEKFVCLNCGFETHADEQAALNIARSWLFLRSQEYKKYQTNKTTGNTDKRAFVETWQSFYRKKLKEVWKPAV

SEQ ID NO: 80 - protein, 977 aa, Artificial Sequence
  CasX Variant
MQEIKRINKIRRRLVKDSNTKKAGKTGPMKTLLVRVMTPDLRERLENLRKKPENIPQPISNTSRANLNKLLTDYTEMKKAILHVYWEEFQKDPVGLMSRVAQPAPKNIDQRKLIPVKDGNERLTSSGFACSQCCQPLYVYKLEQVNDKGKPHTNYFGRCNVSEHERLILLSPHKPEANDELVTYSLGKFGQRALDFYSIHVTRESNHPVKPLEQIGGNSCASGPVGKALSDACMGAVASFLTKYQDIILEHQKVIKKNEKRLANLKDIASANGLAFPKITLPPQPHTKEGIEAYNNVVAQIVIWVNLNLWQKLKIGRDEAKPLQRLKGFPSFPLVERQANEVDWWDMVCNVKKLINEKKEDGKVFWQNLAGYKRQEALLPYLSSEEDRKKGKKFARYQFGDLLLHLEKKHGEDWGKVYDEAWERIDKKVEGLSKHIKLEEERRSEDAQSKAALTDWLRAKASFVIEGLKEADKDEFKRCELKLQKWYGDLRGKPFAIEAENSILDISGFSKQYNCAFIWQKDGVKKLNLYLIINYFKGGKLRFKKIKPEAFEANRFYTVINKKSGEIVPMEVNFNFDDPNLIILPLAFGKRQGREFIWNDLLSLETGSLKLANGRVIEKTLYNRRTRQDEPALFVALTFERREVLDSSNIKPMNLIGIDRGENIPAVIALTDPEGCPLSRFKDSLGNPTHILRIGESYKEKQRTIQAKKEVEQRRAGGYSRKYASKAKNLADDMVRNTARDLLYYAVTQDAMLIFENLSRGFGRQGKRTFMAERQYTRMEDWLTAKLAYEGLSKTYLSKTLAQYTSKTCSNCGFTITSADYDRVLEKLKKTATGWMTTINGKELKVEGQITYYNRYKRQNVVKDLSVELDRLSEESVNNDISSWTKGRSGEALSLLKKRFSHRPVQEKFVCLNCGFETHADEQAALNIARSWLFLRSQEYKKYQTNKTTGNTDKRAFVETWQSFYRKKLKEVWKPAV

SEQ ID NO: 81 - protein, 978 aa, Artificial Sequence
  CasX Variant
MQEIKRINKIRRRLVKDSNTKKAGKTGPMKTLLVRVMTPDLRERLENLRKKPENIPQPISNTSRANLNKLLTDYTEMKKAILHVYWEEFQKDPVGLMSRVAQPAPKNIDQRKLIPVKDGNERLTSSGFACSQCCQPLYVYKLEQVNDKGKPHTNYFGRCNVSEHERLILLSPHKPEANDELVTYSLGKFGQRALDFYSIHVTRESNHPVKPLEQIGGNSCASGPVGKALSDACMGAVASFLTKYQDIIIEHQKVIKKNEKRLANLKDIASANGLAFPKITLPPQPHTKEGIEAYNNVVAQIVIWVNLNLWQKLKIGRDEAKPLQRLKGFPSFPLVERQANEVDWWDMVCNVKKLINEKKEDGKVFWQNLAGYKRQEALLPYLSSEEDRKKGKKFARYQFGDLLLHLEKKHGEDWGKVYDEAWERIDKKVEGLSKHIKLEEERRSEDAQSKAALTDWLRAKASFVIEGLKEADKDEFCRCELKLQKWYGDLRGKPFAIEAENSILDISGFSKQYNCAFIWQKDGVKKLNLYLIINYFKGGKLRFKKIKPEAFEANRFYTVINKKSGEIVPMEVNFNFDDPNLIILPLAFGKRQGREFIWNDLLSLETGSLKLANGRVIEKTLYNRRTRQDEPALFVALTFERREVLDSSNIKPMNLIGIDRGENIPAVIALTDPEGCPLSRFKDSLGNPTHILRIGESYKEKQRTIQAAKEVEQRRAGGYSRKYASKAKNLADDMVRNTARDLLYYAVTQDAMLIFENLSRGFGRQGKRTFNAERQYTRMEDWLTAKLAYEGLPSKTYLSKTLAQYTSKTCSNCGFTITSADYDRVLEKLKKTATGWMTTINGKELKVEGQITYYNRYKRQNVVKDLSVELDRLSEESVNNDISSWTKGRSGEALSLLKKRFSHRPVQEKFVCLNCGFETHADEQAALNIARSWLFLRSQEYKKYQTNKTTGNTDKRAFVETWQSFYRKKLKEVWKPAV

SEQ ID NO: 82 - protein, 978 aa, Artificial Sequence
  CasX Variant
MQEIKRINKIRRRLVKDSNTKKAGKTGPMKTLLVRVMTPDLRERLENLRKKPENIPQPISNTSRANLNKLLTDYTEMKKAILHVYWEEFQKDPVGLMSRVAQPAPKNIDQRKLIPVKDGNERLTSSGFACSQCCQPLYVYKLEQVNDKGKPHTNYFGRCNVSEHERLILLSPHKPEANDELVTYSLGKFGQRALDFYSIHVTRESNHPVKPLEQIGGNSCASGPVGKALSDACMGAVASFLTKYQDIILEHQKVIKKNEKRLANLKDIASANGLAFPKITLPPQPHTKEGIEAYNNVVAQIVIWVNLNLWQKLKIGRDEAKPLQRLKGFPSFPLVERQANEVDWWDMVCNVKKLINEKKEDGKVFWQNLAGYKRQEALLPYLSSEEDRKKGKKFARYQFGDLLLHLEKKHGEDWGKVYDEAWERIDKKVEGLSKHIKLEEERRSEDAQSKAALTDWLRAKASFVIEGLKEADKDEFCRCELKLQKWYGDLRGKPFAIEAENSILDISGFSKQYNCAFIWQKDGVKKLNLYLIINYFKGGKLRFKKIKPEAFEANRFYTVINKKSGEIVPMEVNFNFDDPNLIILPLAFGKRQGREFIWNDLLSLETGSLKLANGRVIEKTLYNRRTRQDEPALFVALTFERREVLDSSNIKPMNLIGIDRGENIPAVIALTDPEGCPLSRFKDSLGNPTHILRIGESYKEKQRTIQAAKEVEQRRAGGYSRKYASKAKNLADDMVRNTARDLLYYAKTQDAMLIFENLSRGFGRQGKRTFMAERQYTRMEDWLTAKLAYEGLPSKTYLSKTLAQYTSKTCSNCGFTITSADYDRVLEKLKKTATGWMTTINGKELKVEGQITYYNRYKRQNVVKDLSVELDRLSEESVNNDISSWTKGRSGEALSLLKKRFSHRPVQEKFVCLNCGFETHADEQAALNIARSWLFLRSQEYKKYQTNKTTGNTDKRAFVETWQSFYRKKLKEVWKPAV

SEQ ID NO: 83 - protein, 977 aa, Artificial Sequence
  CasX Variant
MQEIKRINKIRRRLVKDSNTKKAGKTGPMKTLLVRVMTPDLRERLENLRKKPENIPQPISNTSRANLNKLLTDYTEMKKAILHVYWEEFQKDPVGLMSRVAQPAPKNIDQRKLIPVKDGNERLTSSGFACSQCCQPLYVYKLEQVNDKGKPHTNYFGRCNVSEHERLILLSPHKPEANDELVTYSLGKFGQRALDFYSIHVTRESNHPVKPLEQIGGNSCASGPVGKALSDACMGAVASFLTKYQDIILEHQKVIKKNEKRLANLKDIASANGLAFPKITLPPQPHTKEGIEAYNNVVAQIVIWVNLNLWQKLKIGRDEAKPLQRLKGFPSFPLVERQANEVDWWDMVCNVKKLINEKKEDGKVFWQNLAGYKRQEALRPYLSSEEDRKKGKKFARYQFGDLLLHLEKKHGEDWGKVYDEAWERIDKKVEGLSKHIKLEEERRSEDAQSKAALTDWLRAKASFVIEGLKEADKDEFKRCELKLQKWYGDLRGKPFAIEAENSILDISGFSKQYNCAFIWQKDGVKKLNLYLIINYFKGGKLRFKKIKPEAFEANRFYTVINKKSGEIVPMEVNFNFDDPNLIILPLAFGKRQGREFIWNDLLSLETGSLKLANGRVIEKTLYNRRTRQDEPALFVALTFERREVLDSSNIKPMNLIGIDRGENIPAVIALTDPEGCPLSRFKDSLGNPTHILRIGESYKEKQRTIQAKKEVEQRRAGGYSRKYASKAKNLADDMVRNTARDLLYYAVTQDAMLIFENLSRGFGRQGKRTFMAERQYTRNEDWLTAKLAYEGLSKTYLSKTLAQYTSKTCSNCGFTITSADYDRVLEKLKKTATGWMTTINGKELKVEGQITYYNRYKRQNVVKDLSVELDRLSEESVNNDISSWTKGRSGEALSLLKKRFSHRPVQEKFVCLNCGFETHADEQAALNIARSWLFLRSQEYKKYQTNKTTGNTDKRAFVETWQSFYRKKLKEVWKPAV

SEQ ID NO: 84 - protein, 978 aa, Artificial Sequence
  CasX Variant
MQEIKRINKIRRRLVKDSNTKKAGKTGPMKTLLVRVMTPDLRERLENLRKKPENIPQPISNTSRANLNKLLTDYTEMKKAILHVYWEEFQKDPVGLMSRVAQPAPKNIDQRKLIPVKDGNERLTSSGFACSQCCQPLYVYKLEQVNDKGKPHTNYFGRCNVSEHERLILLSPHKPEANDELVTYSLGKFGQRALDFYSIHVTRESNHPVKPLEQIGGNSCASGPVGKALSDACMGAVASFLTKYQDIILEHQKVIKKNEKRLANLKDIASANGLAFPKITLPPQPHTKEGIEAYNNVVAQIVIWVNLNLWQKLKIGRDEAKPLQRLKGFPSFPLVERQANEVDWWDMVCNVKKLINEKKEDGKVFWQNLAGYKRQEALLPYLSSEEDRKKGKKFARYQFGDLLLHLEKKHGEDWGKVYDEAWERIDKKVEGLSKHIKLEEERRSEDAQSKAALTDWLRAKASFVIEGLKEADKDEFCRCELKLQKWYGDLRGKPFAIEAENSILDISGFSKQYNCAFIWQKDGVKKLNLYLIINYFKGGKLRFKKIKPEAFEANRFYTVINKKSGEIVPMEVNFNFDDPNLIILPLAFGKRQGREFIWNDLLSLETGSLKLANGRVIEKTLYNRRTRQDEPALFVALTFERREVLDSSNIKPMNLIGIDRGENIPAVIALTDPEGCPLSRFKDSLGNPTHILRIGESYKEKQRTIQAAKEVEQRRAGGYSRKYASKAKNLADDMVRNTARDLLYYAVTQDAMLIMENLSRGFGRQGKRTFMAERQYTRMEDWLTAKLAYEGLPSKTYLSKTLAQYTSKTCSNCGFTITSADYDRVLEKLKKTATGWMTTINGKELKVEGQITYYNRYKRQNVVKDLSVELDRLSEESVNNDISSWTKGRSGEALSLLKKRFSHRPVQEKFVCLNCGFETHADEQAALNIARSWLFLRSQEYKKYQTNKTTGNTDKRAFVETWQSFYRKKLKEVWKPAV

SEQ ID NO: 85 - protein, 977 aa, Artificial Sequence
  CasX Variant
MQEIKRINKIRRRLVKDSNTKKAGKTGPMKTLLVRVMTPDLRERLENLRKKPENIPQPISNTSRANLNKLLTDYTEMKKAILHVYWEEFQKDPVGLMSRVAQPAPKNIDQRKLIPVKDGNERLTSSGFACSQCCQPLYVYKLEQVNDKGKPHTNYFGRCNVSEHERLILLSPHKPEANDELVTYSLGKFGQRALDFYSIHVTRESNHPVKPLEQIGGNSCASGPVGKALSDACMGAVASFLTKYQDIILEHQKVIKKNEKRLANLKDIASANGLAFPKITLPPQPHTKEGIEAYNNVVAQIVIWVNLNLWQKLKIGRDEAKPLQRLKGFPSFPLVERQANEVDWWDMVCNVKKLINEKKEDGKVFWQNLAGYKRQEALRPYLSSEEDRKKGKKFARYQFGDLLLHLEKKHGEDWGKVYDEAWERIDKKVEGLSKHIKLEEERRSEDAQSKAALTDWLRAKASFVIEGLKEADKDEFCRCELKLQKWYGDLRGKPFAIEAENSILDISGFSKQYNCAFIWQKDGVKKLNLYLIINYFKGGKLRFKKIKPEAFEANRFYTVINKKSGEIVPMEVNFNFDDPNLIILPLAFGKRQGREFIWNDLLSLETGSLKLANGRVIEKTLYNRRTRQDEPALFVALTFERREVLDSSNIKPMNLIGIDRGENIPAVIALTDPEGCPLSRFKDSLGNPTHILRIGESYKEKQRTIQAKKEVEQRRAGGYSRKYASKAKNLADDMVRNTARDLLYYAVTQDAMLIFENLSRGFGRQGKRTFMAERQYTRMEDWLTAKLAYEGLSKTYLSKTLAQYTSKTCSNCGFTITSADYDRVLEKLKKTATGWMTTINGKELKVEGQITYYNRRKRQNVVKDLSVELDRLSEESVNNDISSWTKGRSGEALSLLKKRFSHRPVQEKFVCLNCGFETHADEQAALNIARSWLFLRSQEYKKYQTNKTTGNTDKRAFVETWQSFYRKKLKEVWKPAV

SEQ ID NO: 86 - protein, 977 aa, Artificial Sequence
  CasX Variant
MQEIKRINKIRRRLVKDSNTKKAGKTGPMKTLLVRVMTPDLRERLENLRKKPENIPQPISNTSRANLNKLLTDYTEMKKAILHVYWEEFQKDPVGLMSRVAQPAPKNIDQRKLIPVKDGNERLTSSGFACSQCCQPLYVYKLEQVNDKGKPHTNYFGRCNVSEHERLILLSPHKPEANDELVTYSLGKFGQRALDFYSIHVTRESNHPVKPLEQIGGNSCASGPVGKALSDACMGAVASFLTKYQDIILEHQKVIKKNEKRLANLKDIASANGLAFPKITLPPQPHTKEGIEAYNNVVAQIVIWVNLNLWQKLKIGRDEAKPLQRLKGFPSFPLVERQANEVDWWDMVCNVKKLINEKKEDGKVFWQNLAGYKRQEALRPYLSSEEDRKKGKKFARYQFGDLLLHLEKKHGEDWGKVYDEAWERIDKKVEGLSKHIKLEEERRSEDAQSKAALTDWLRAKASFVIEGLKEADKDEFCRCELKLQKWYGDLRGKPFAIEAENSILDISGFSKQYNCAFIWQKDGVKKLNLYLIINYFKGGKLRFKKIKPEAFEANRFYTVINKKSGEIVPMEVNFNFDDPNLIILPLAFGKRQGREFIWNDLLSLETGSLKLANGRVIEKTLYNRRTRQDEPALFVALTFERREVLDSSNIKPMNLIGVDRGENIPAVIALTDPEGCPLSRFKDSLGNPTHILRIGESYKEKQRTIQAKKEVEQRRAGGYSRKYASKAKNLADDMVRNTARDLLYYAVTQDAMLIFENLSRGFGRQGKRTFMAERQYTRMEDWLTAKLAYEGLSKTYLSKTLAQYTSKTCSNCGFTITSADYDRVLEKLKKTATGWMTTINGKELKVEGQITYYNRRKRQNVVKDLSVELDRLSEESVNNDISSWTKGRSGEALSLLKKRFSHRPVQEKFVCLNCGFETHADEQAALNIARSWLFLRSQEYKKYQTNKTTGNTDKRAFVETWQSFYRKKLKEVWKPAV

SEQ ID NO: 87 - protein, 977 aa, Artificial Sequence
  CasX Variant
MQEIKRINKIRRRLVKDSNTKKAGKTGPMKTLLVRVMTPDLRERLENLRKKPENIPQPISNTSRANLNKLLTDYTEMKKAILHVYWEEFQKDPVGLMSRVAQPAPKNIDQRKLIPVKDGNERLTSSGFACSQCCQPLYVYKLEQVNDKGKPHTNYFGRCNVSEHERLILLSPHKPEANDELVTYSLGKFGQRALDFYSIHVTRESNHPVKPLEQIGGNSCASGPVGKALSDACMGAVASFLTKYQDIILEHQKVIKKNEKRLANLKDIASANGLAFPKITLPPQPHTKEGIEAYNNVVAQIVIWVNLNLWQKLKIGRDEAKPLQRLKGFPSFPLVERQANEVDWWDMVCNVKKLINEKKEDGKVFWQNLAGYKRQEALRPYLSSENDRKKGKKFARYQFGDLLLHLEKKHGEDWGKVYDEAWERIDKKVEGLSKHIKLEEERRSEDAQSKAALTDWLRAKASFVIEGLKEADKDEFCRCELKLQKWYGDLRGKPFAIEAENSILDISGFSKQYNCAFIWQKDGVKKLNLYLIINYFKGGKLRFKKIKPEAFEANRFYTVINKKSGEIVPMEVNFNFDDPNLIILPLAFGKRQGREFIWNDLLSLETGSLKLANGRVIEKTLYNRRTRQDEPALFVALTFERREVLDSSNIKPMNLIGVDRGENIPAVIALTDPEGCPLSRFKDSLGNPTHILRIGESYKEKQRTIQAKKEVEQRRAGGYSRKYASKAKNLADDMVRNTARDLLYYAVTQDAMLIFENLSRGFGRQGKRTFMAERQYTRMEDWLTAKLAYEGLSKTYLSKTLAQYTSKTCSNCGFTITSADYDRVLEKLKKTATGWMTTINGKELKVEGQITYYNRRKRQNVVKDLSVELDRLSEESVNNDISSWTKGRSGEALSLLKKRFSHRPVQEKFVCLNCGFETHADEQAALNIARSWLFLRSQEYKKYQTNKTTGNTDKRAFVETWQSFYRKKLKEVWKPAV

SEQ ID NO: 88 - protein, 977 aa, Artificial Sequence
  CasX Variant
MQEIKRINKIRRRLVKDSNTKKAGKTGPMKTLLVRVMTPDLRERLENLRKKPENIPQPISNTSRANLNKLLTDYTEMKKAILHVYWEEFQKDPVGLMSRVAQPAPKNIDQRKLIPVKDGNERLTSSGFACSQCCQPLYVYKLEQVNDKGKPHTNYFGRCNVSEHERLILLSPHKPEANDELVTYSLGKFGQRALDFYSIHVTRESNHPVKPLEQIGGNSCASGPVGKALSDACMGAVASFLTKYQDIILEHQKVIKKNEKRLANLKDIASANGLAFPKITLPPQPHTKEGIEAYNNVVAQIVIWVNLNLWQKLKIGRDEAKPLQRLKGFPSFPLVERQANEVDWWDMVCNVKKLINEKKEDGKVFWQNLAGYKRQEALRPYLSSEEDRKKGKKFARYQFGDLLKHLEKKHGEDWGKVYDEAWERIDKKVEGLSKHIKLEEERRSEDAQSKAALTDWLRAKASFVIEGLKEADKDEFCRCELKLQKWYGDLRGKPFAIEAENSILDISGFSKQYNCAFIWQKDGVKKLNLYLIINYFKGGKLRFKKIKPEAFEANRFYTVINKKSGEIVPMEVNFNFDDPNLIILPLAFGKRQGREFIWNDLLSLETGSLKLANGRVIEKTLYNRRTRQDEPALFVALTFERREVLDSSNIKPMNLIGVDRGENIPAVIALTDPEGCPLSRFKDSLGNPTHILRIGESYKEKQRTIQAKKEVEQRRAGGYSRKYASKAKNLADDMVRNTARDLLYYAVTQDAMLIFENLSRGFGRQGKRTFMAERQYTRMEDWLTAKLAYEGLSKTYLSKTLAQYTSKTCSNCGFTITSADYDRVLEKLKKTATGWMTTINGKELKVEGQITYYNRRKRQNVVKDLSVELDRLSEESVNNDISSWTKGRSGEALSLLKKRFSHRPVQEKFVCLNCGFETHADEQAALNIARSWLFLRSQEYKKYQTNKTTGNTDKRAFVETWQSFYRKKLKEVWKPAV

SEQ ID NO: 89 - protein, 978 aa, Artificial Sequence
  CasX Variant
MQEIKRINKIRRRLVKDSNTKKAGKTGPMKTLLVRVMTPDLRERLENLRKKPENIPQPISNTSRANLNKLLTDYTEMKKAILHVYWEEFQKDPVGLMSRVAQPAPKNIDQRKLIPVKDGNERLTSSGFACSQCCQPLYVYKLEQVNDKGKPHTNYFGRCNVSEHERLILLSPHKPEANDELVTYSLGKFGQVRALDFYSIHVTRESNHPVKPLEQIGGNSCASGPVGKALSDACMGAVASFLTKYQDIILEHQKVIKKNEKRLANLKDIASANGLAFPKITLPPQPHTKEGIEAYNNVVAQIVIWVNLNLWQKLKIGRDEAKPLQRLKGFPSFPLVERQANEVDWWDMVCNVKKLINEKKEDGKVFWQNLAGYKRQEALRPYLSSEEDRKKGKKFARYQFGDLLLHLEKKHGEDWGKVYDEAWERIDKKVEGLSKHIKLEEERRSEDAQSKAALTDWLRAKASFVIEGLKEADKDEFCRCELKLQKWYGDLRGKPFAIEAENSILDISGFSKQYNCAFIWQKDGVKKLNLYLIINYFKGGKLRFKKIKPEAFEANRFYTVINKKSGEIVPMEVNFNFDDPNLIILPLAFGKRQGREFIWNDLLSLETGSLKLANGRVIEKTLYNRRTRQDEPALFVALTFERREVLDSSNIKPMNLIGVDRGENIPAVIALTDPEGCPLSRFKDSLGNPTHILRIGESYKEKQRTIQAKKEVEQRRAGGYSRKYASKAKNLADDMVRNTARDLLYYAVTQDAMLIFENLSRGFGRQGKRTFMAERQYTRMEDWLTAKLAYEGLSKTYLSKTLAQYTSKTCSNCGFTITSADYDRVLEKLKKTATGWMTTINGKELKVEGQITYYNRRKRQNVVKDLSVELDRLSEESVNNDISSWTKGRSGEALSLLKKRFSHRPVQEKFVCLNCGFETHADEQAALNIARSWLFLRSQEYKKYQTNKTTGNTDKRAFVETWQSFYRKKLKEVWKPAV

SEQ ID NO: 90 - protein, 977 aa, Artificial Sequence
  CasX Variant
MQEIKRINKIRRRLVKDSNTKKAGKTGPMKTLLVRVMTPDLRERLENLRKKPENIPQPISNTSRANLNKLLTDYTEMKKAILHVYWEEFQKDPVGLMSRVAQPAPKNIDQRKLIPVKDGNERLTSSGFACSQCCQPLYVYKLEQVNDKGKPHTNYFGRCNVSEHERLILLSPHKPEANDELVTYSLGKFGQRALDFYSIHVTRESNHPVKPLEQIGGNSCASGPVGKALSDACMGAVASFLTKYQDIILEHQKVIKKNEKRLANLKDIASANGLAFPKITLPPQPHTKEGIEAYNNVVAQIVIWVNLNLWQKLKIGRDEAKPLQRLKGFPSFPLVERQANEVDWWDMVCNVKKLINEKKEDGKVFWQNLAGYKRQEALRPYLSSENDRKKGKKFARYQFGDLLKHLEKKHGEDWGKVYDEAWERIDKKVEGLSKHIKLEEERRSEDAQSKAALTDWLRAKASFVIEGLKEADKDEFCRCELKLQKWYGDLRGKPFAIEAENSILDISGFSKQYNCAFIWQKDGVKKLNLYLIINYFKGGKLRFKKIKPEAFEANRFYTVINKKSGEIVPMEVNFNFDDPNLIILPLAFGKRQGREFIWNDLLSLETGSLKLANGRVIEKTLYNRRTRQDEPALFVALTFERREVLDSSNIKPMNLIGVDRGENIPAVIALTDPEGCPLSRFKDSLGNPTHILRIGESYKEKQRTIQAKKEVEQRRAGGYSRKYASKAKNLADDMVRNTARDLLYYAVTQDAMLIFENLSRGFGRQGKRTFMAERQYTRMEDWLTAKLAYEGLSKTYLSKTLAQYTSKTCSNCGFTITSADYDRVLEKLKKTATGWMTTINGKELKVEGQITYYNRRKRQNVVKDLSVELDRLSEESVNNDISSWTKGRSGEALSLLKKRFSHRPVQEKFVCLNCGFETHADEQAALNIARSWLFLRSQEYKKYQTNKTTGNTDKRAFVETWQSFYRKKLKEVWKPAV

SEQ ID NO: 91 - protein, 977 aa, Artificial Sequence
  CasX Variant
MQEIKRINKIRRRLVKDSNTKKAGKTGPMKTLLVRVMTPDLRERLENLRKKPENIPQPISNTSRANLNKLLTDYTEMKKAILHVYWEEFQKDPVGLMSRVAQPAPKNIDQRKLIPVKDGNERLTSSGFACSQCCQPLYVYKLEQVNDKGKPHTNYFGRCNVSEHERLILLSPHKPEANDELVTYSLGKFGQRALDFYSIHVTRESNHPVKPLEQIGGNSCASGPVGKALSDACMGAVASFLTKYQDIILEHQKVIKKNEKRLANLKDIASANGLAFPKITLPPQPHTKEGIEAYNNVVAQIVIWVNLNLWQKLKIGRDEAKPLQRLKGFPSFPLVERQANEVDWWDMVCNVKKLINEKKEDGKVFWQNLAGYKRQEALRPYLSSEEDRKKGKKFARYQLGDLLLHLEKKHGEDWGKVYDEAWERIDKKVEGLSKHIKLEEERRSEDAQSKAALTDWLRAKASFVIEGLKEADKDEFCRCELKLQKWYGDLRGKPFAIEAENSILDISGFSKQYNCAFIWQKDGVKKLNLYLIINYFKGGKLRFKKIKPEAFEANRFYTVINKKSGEIVPMEVNFNFDDPNLIILPLAFGKRQGREFIWNDLLSLETGSLKLANGRVIEKTLYNRRTRQDEPALFVALTFERREVLDSSNIKPMNLIGVDRGENIPAVIALTDPEGCPLSRFKDSLGNPTHILRIGESYKEKQRTIQAKKEVEQRRAGGYSRKYASKAKNLADDMVRNTARDLLYYAVTQDAMLIFENLSRGFGRQGKRTFMAERQYTRMEDWLTAKLAYEGLSKTYLSKTLAQYTSKTCSNCGFTITSADYDRVLEKLKKTATGWMTTINGKELKVEGQITYYNRRKRQNVVKDLSVELDRLSEESVNNDISSWTKGRSGEALSLLKKRFSHRPVQEKFVCLNCGFETHADEQAALNIARSWLFLRSQEYKKYQTNKTTGNTDKRAFVETWQSFYRKKLKEVWKPAV

SEQ ID NO: 92 - protein, 977 aa, Artificial Sequence
  CasX Variant
MQEIKRINKIRRRLVKDSNTKKAGKTGPMKTLLVRVMTPDLRERLENLRKKPENIPQPISNTSRANLNKLLTDYTEMKKAILHVYWEEFQKDPVGLMSRVAQPAPKNIDQRKLIPVKDGNERLTSSGFACSQCCQPLYVYKLEQVNDKGKPHTNYFGRCNVSEHERLILLSPHKPEANDELVTYSLGKFGQRALDFYSIHVTRESNHPVKPLEQIGGNSCASGPVGKALSDACMGAVASFLTKYQDIILEHQKVIKKNEKRLANLKDIASANGLAFPKITLPPQPHTKEGIEAYNNVVAQIVIWVNLNLWQKLKIGRDEAKPLQRLKGFPSFPLVERQANEVDWWDMVCNVKKLINEKKEDGKVFWQNLAGYKRQEALRPYLSSENDRKKGKKFARYQLGDLLLHLEKKHGEDWGKVYDEAWERIDKKVEGLSKHIKLEEERRSEDAQSKAALTDWLRAKASFVIEGLKEADKDEFCRCELKLQKWYGDLRGKPFAIEAENSILDISGFSKQYNCAFIWQKDGVKKLNLYLIINYFKGGKLRFKKIKPEAFEANRFYTVINKKSGEIVPMEVNFNFDDPNLIILPLAFGKRQGREFIWNDLLSLETGSLKLANGRVIEKTLYNRRTRQDEPALFVALTFERREVLDSSNIKPMNLIGVDRGENIPAVIALTDPEGCPLSRFKDSLGNPTHILRIGESYKEKQRTIQAKKEVEQRRAGGYSRKYASKAKNLADDMVRNTARDLLYYAVTQDAMLIFENLSRGFGRQGKRTFMAERQYTRMEDWLTAKLAYEGLSKTYLSKTLAQYTSKTCSNCGFTITSADYDRVLEKLKKTATGWMTTINGKELKVEGQITYYNRRKRQNVVKDLSVELDRLSEESVNNDISSWTKGRSGEALSLLKKRFSHRPVQEKFVCLNCGFETHADEQAALNIARSWLFLRSQEYKKYQTNKTTGNTDKRAFVETWQSFYRKKLKEVWKPAV

SEQ ID NO: 93 - protein, 977 aa, Artificial Sequence
  CasX Variant
MQEIKRINKIRRRLVKDSNTKKAGKTGPMKTLLVRVMTPDLRERLENLRKKPENIPQPISNTSRANLNKLLTDYTEMKKAILHVYWEEFQKDPVGLMSRVAQPAPKNIDQRKLIPVKDGNERLTSSGFACSQCCQPLYVYKLEQVNDKGKPHTNYFGRCNVSEHERLILLSPHKPEANDELVTYSLGKFGQRALDFYSIHVTRESNHPVKPLEQIGGNSCASGPVGKALSDACMGAVASFLTKYQDIILEHQKVIKKNEKRLANLKDIASANGLAFPKITLPPQPHTKEGIEAYNNVVAQIVIWVNLNLWQKLKIGRDEAKPLQRLKGFPSFPLVERQANEVDWWDMVCNVKKLINEKKEDGKVFWQNLAGYKRQEALRPYLSSEEDRKKGKKFARYQLGDLLLHLEKKHGEDWGKVYDEAWERIDKKVEGLSKHIKLEEERRSEDAQSKAALTDWLRAKASFVIEGLKEADKDEFSRCELKLQKWYGDLRGKPFAIEAENSILDISGFSKQYNCAFIWQKDGVKKLNLYLIINYFKGGKLRFKKIKPEAFEANRFYTVINKKSGEIVPMEVNFNFDDPNLIILPLAFGKRQGREFIWNDLLSLETGSLKLANGRVIEKTLYNRRTRQDEPALFVALTFERREVLDSSNIKPMNLIGVDRGENIPAVIALTDPEGCPLSRFKDSLGNPTHILRIGESYKEKQRTIQAKKEVEQRRAGGYSRKYASKAKNLADDMVRNTARDLLYYAVTQDAMLIFENLSRGFGRQGKRTFMAERQYTRMEDWLTAKLAYEGLSKTYLSKTLAQYTSKTCSNCGFTITSADYDRVLEKLKKTATGWMTTINGKELKVEGQITYYNRRKRQNVVKDLSVELDRLSEESVNNDISSWTKGRSGEALSLLKKRFSHRPVQEKFVCLNCGFETHADEQAALNIARSWLFLRSQEYKKYQTNKTTGNTDKRAFVETWQSFYRKKLKEVWKPAV

SEQ ID NO: 94 - protein, 977 aa, Artificial Sequence
  CasX Variant
MQEIKRINKIRRRLVKDSNTKKAGKTGPMKTLLVRVMTPDLRERLENLRKKPENIPQPISNTSRANLNKLLTDYTEMKKAILHVYWEEFQKDPVGLMSRVAQPAPKNIDQRKLIPVKDGNERLTSSGFACSQCCQPLYVYKLEQVNDKGKPHTNYFGRCNVSEHERLILLSPHKPEANDELVTYSLGKFGQRALDFYSIHVTRESNHPVKPLEQIGGNSCASGPVGKALSDACMGAVASFLTKYQDIILEHQKVIKKNEKRLANLKDIASANGLAFPKITLPPQPHTKEGIEAYNNVVAQIVIWVNLNLWQKLKIGRDEAKPLQRLKGFPSFPLVERQANEVDWWDMVCNVKKLINEKKEDGKVFWQNLAGYKRQEALRPYLSSEEDRKKGKKFARYQLGDLLKHLEKKHGEDWGKVYDEAWERIDKKVEGLSKHIKLEEERRSEDAQSKAALTDWLRAKASFVIEGLKEADKDEFCRCELKLQKWYGDLRGKPFAIEAENSILDISGFSKQYNCAFIWQKDGVKKLNLYLIINYFKGGKLRFKKIKPEAFEANRFYTVINKKSGEIVPMEVNFNFDDPNLIILPLAFGKRQGREFIWNDLLSLETGSLKLANGRVIEKTLYNRRTRQDEPALFVALTFERREVLDSSNIKPMNLIGVDRGENIPAVIALTDPEGCPLSRFKDSLGNPTHILRIGESYKEKQRTIQAKKEVEQRRAGGYSRKYASKAKNLADDMVRNTARDLLYYAVTQDAMLIFENLSRGFGRQGKRTFMAERQYTRMEDWLTAKLAYEGLSKTYLSKTLAQYTSKTCSNCGFTITSADYDRVLEKLKKTATGWMTTINGKELKVEGQITYYNRRKRQNVVKDLSVELDRLSEESVNNDISSWTKGRSGEALSLLKKRFSHRPVQEKFVCLNCGFETHADEQAALNIARSWLFLRSQEYKKYQTNKTTGNTDKRAFVETWQSFYRKKLKEVWKPAV

SEQ ID NO: 95 - protein, 977 aa, Artificial Sequence
  CasX Variant
MQEIKRINKIRRRLVKDSNTKKAGKTGPMKTLLVRVMTPDLRERLENLRKKPENIPQPISNTSRANLNKLLTDYTEMKKAILHVYWEEFQKDPVGLMSRVAQPAPKNIDQRKLIPVKDGNERLTSSGFACSQCCQPLYVYKLEQVNDKGKPHTNYFGRCNVSEHERLILLSPHKPEANDELVTYSLGKFGQRALDFYSIHVTRESNHPVKPLEQIGGNSCASGPVGKALSDACMGAVASFLTKYQDIILEHQKVIKKNEKRLANLKDIASANGLAFPKITLPPQPHTKEGIEAYNNVVAQIVIWVNLNLWQKLKIGRDEAKPLQRLKGFPSFPLVERQANEVDWWDMVCNVKKLINEKKEDGKVFWQNLAGYKRQEALRPYLSSENDRKKGKKFARYQLGDLLKHLEKKHGEDWGKVYDEAWERIDKKVEGLSKHIKLEEERRSEDAQSKAALTDWLRAKASFVIEGLKEADKDEFSRCELKLQKWYGDLRGKPFAIEAENSILDISGFSKQYNCAFIWQKDGVKKLNLYLIINYFKGGKLRFKKIKPEAFEANRFYTVINKKSGEIVPMEVNFNFDDPNLIILPLAFGKRQGREFIWNDLLSLETGSLKLANGRVIEKTLYNRRTRQDEPALFVALTFERREVLDSSNIKPMNLIGVDRGENIPAVIALTDPEGCPLSRFKDSLGNPTHILRIGESYKEKQRTIQAKKEVEQRRAGGYSRKYASKAKNLADDMVRNTARDLLYYAVTQDAMLIFENLSRGFGRQGKRTFMAERQYTRMEDWLTAKLAYEGLSKTYLSKTLAQYTSKTCSNCGFTITSADYDRVLEKLKKTATGWMTTINGKELKVEGQITYYNRRKRQNVVKDLSVELDRLSEESVNNDISSWTKGRSGEALSLLKKRFSHRPVQEKFVCLNCGFETHADEQAALNIARSWLFLRSQEYKKYQTNKTTGNTDKRAFVETWQSFYRKKLKEVWKPAV

SEQ ID NO: 96 - protein, 977 aa, Artificial Sequence
  CasX Variant
MQEIKRINKIRRRLVKDSNTKKAGKTGPMKTLLVRVMTPDLRERLENLRKKPENIPQPISNTSRANLNKLLTDYTEMKKAILHVYWEEFQKDPVGLMSRVAQPAPKNIDQRKLIPVKDGNERLTSSGFACSQCCQPLYVYKLEQVNDKGKPHTNYFGRCNVSEHERLILLSPHKPEANDELVTYSLGKFGQRALDFYSIHVTRESNHPVKPLEQIGGNSCASGPVGKALSDACMGAVASFLTKYQDIILEHQKVIKKNEKRLANLKDIASANGLAFPKITLPPQPHTKEGIEAYNNVVAQIVIWVNLNLWQKLKIGRDEAKPLQRLKGFPSFPLVERQANEVDWWDMVCNVKKLINEKKEDGKVFWQNLAGYKRQEALRPYLSSEEDRKKGKKFARYQLGDLLLHLEKKHGEDWGKVYDEAWERIDKKVEGLSKHIKLEEERRSEDAQSKAALTDWLRAKASFVIEGLKEADKDEFCRCELKLQKWYGDLRGKPFAIEAENSILDISGFSKQYNCAFIWQKDGVKKLNLYLIINYFKGGKLRFKKIKPEAFEANRFYTVINKKSGEIVPMEVNFNFDDPNLIILPLAFGKRQGREFIWNDLLSLETGSLKLANGRVIEKTLYNRRTRQDEPALFVALTFERREVLDSSNIKPMNLIGVDRGENIPAVIALTDPEGCPLSRFKDSLGNPTHILRIGESYKEKQRTIQAKKEVEQRRAGGYSRKYASKAKNLADDMVRNTARDLLYYAVTQDAMLIFENLSRGFGRQGKRTFMAERQYTRMEDWLTAKLAYEGLSKTLLSKTLAQYTSKTCSNCGFTITSADYDRVLEKLKKTATGWMTTINGKELKVEGQITYYNRRKRQNVVKDLSVELDRLSEESVNNDISSWTKGRSGEALSLLKKRFSHRPVQEKFVCLNCGFETHADEQAALNIARSWLFLRSQEYKKYQTNKTTGNTDKRAFVETWQSFYRKKLKEVWKPAV

SEQ ID NO: 97 - protein, 977 aa, Artificial Sequence
  CasX Variant
MQEIKRINKIRRRLVKDSNTKKAGKTGPMKTLLVRVMTPDLRERLENLRKKPENIPQPISNTSRANLNKLLTDYTEMKKAILHVYWEEFQKDPVGLMSRVAQPAPKNIDQRKLIPVKDGNERLTSSGFACSQCCQPLYVYKLEQVNDKGKPHTNYFGRCNVSEHERLILLSPHKPEANDELVTYSLGKFGQRALDFYSIHVTRESNHPVKPLEQIGGNSCASGPVGKALSDACMGAVASFLTKYQDIILEHQKVIKKNEKRLANLKDIASANGLAFPKITLPPQPHTKEGIEAYNNVVAQIVIWVNLNLWQKLKIGRDEAKPLQRLKGFPSFPLVERQANEVDWWDMVCNVKKLINEKKEDGKVFWQNLAGYKRQEALRPYLSSENDRKKGKKFARYQLGDLLLHLEKKHGEDWGKVYDEAWERIDKKVEGLSKHIKLEEERRSEDAQSKAALTDWLRAKASFVIEGLKEADKDEFCRCELKLQKWYGDLRGKPFAIEAENSILDISGFSKQYNCAFIWQKDGVKKLNLYLIINYFKGGKLRFKKIKPEAFEANRFYTVINKKSGEIVPMEVNFNFDDPNLIILPLAFGKRQGREFIWNDLLSLETGSLKLANGRVIEKTLYNRRTRQDEPALFVALTFERREVLDSSNIKPMNLIGVDRGENIPAVIALTDPEGCPLSRFKDSLGNPTHILRIGESYKEKQRTIQAKKEVEQRRAGGYSRKYASKAKNLADDMVRNTARDLLYYAVTQDAMLIFENLSRGFGRQGKRTFMAERQYTRMEDWLTAKLAYEGLSKTLLSKTLAQYTSKTCSNCGFTITSADYDRVLEKLKKTATGWMTTINGKELKVEGQITYYNRRKRQNVVKDLSVELDRLSEESVNNDISSWTKGRSGEALSLLKKRFSHRPVQEKFVCLNCGFETHADEQAALNIARSWLFLRSQEYKKYQTNKTTGNTDKRAFVETWQSFYRKKLKEVWKPAV

SEQ ID NO: 98 - protein, 977 aa, Artificial Sequence
  CasX Variant
MQEIKRINKIRRRLVKDSNTKKAGKTGPMKTLLVRVMTPDLRERLENLRKKPENIPQPISNTSRANLNKLLTDYTEMKKAILHVYWEEFQKDPVGLMSRVAQPAPKNIDQRKLIPVKDGNERLTSSGFACSQCCQPLYVYKLEQVNDKGKPHTNYFGRCNVSEHERLILLSPHKPEANDELVTYSLGKFGQRALDFYSIHVTRESNHPVKPLEQIGGNSCASGPVGKALSDACMGAVASFLTKYQDIILEHQKVIKKNEKRLANLKDIASANGLAFPKITLPPQPHTKEGIEAYNNVVAQIVIWVNLNLWQKLKIGRDEAKPLQRLKGFPSFPLVERQANEVDWWDMVCNVKKLINEKKEDGKVFWQNLAGYKRQEALRPYLSSENDRKKGKKFARYQLGDLLKHLEKKHGEDWGKVYDEAWERIDKKVEGLSKHIKLEEERRSEDAQSKAALTDWLRAKASFVIEGLKEADKDEFSRCELKLQKWYGDLRGKPFAIEAENSILDISGFSKQYNCAFIWQKDGVKKLNLYLIINYFKGGKLRFKKIKPEAFEANRFYTVINKKSGEIVPMEVNFNFDDPNLIILPLAFGKRQGREFIWNDLLSLETGSLKLANGRVIEKTLYNRRTRQDEPALFVALTFERREVLDSSNIKPMNLIGVDRGENIPAVIALTDPEGCPLSRFKDSLGNPTHILRIGESYKEKQRTIQAKKEVEQRRAGGYSRKYASKAKNLADDMVRNTARDLLYYAVTQDAMLIFENLSRGFGRQGKRTFMAERQYTRMEDWLTAKLAYEGLSKTLLSKTLAQYTSKTCSNCGFTITSADYDRVLEKLKKTATGWMTTINGKELKVEGQITYYNRRKRQNVVKDLSVELDRLSEESVNNDISSWTKGRSGEALSLLKKRFSHRPVQEKFVCLNCGFETHADEQAALNIARSWLFLRSQEYKKYQTNKTTGNTDKRAFVETWQSFYRKKLKEVWKPAV

SEQ ID NO: 99 - protein, 977 aa, Artificial Sequence
  CasX Variant
MQEIKRINKIRRRLVKDSNTKKAGKTGPMKTLLVRVMTPDLRERLENLRKKPENIPQPISNTSRANLNKLLTDYTEMKKAILHVYWEEFQKDPVGLMSRVAQPAPKNIDQRKLIPVKDGNERLTSSGFACSQCCQPLYVYKLEQVNDKGKPHTNYFGRCNVSEHERLILLSPHKPEANDELVTYSLGKFGQRALDFYSIHVTRESNHPVKPLEQIGGNSCASGPVGKALSDACMGAVASFLTKYQDIILEHQKVIKKNEKRLANLKDIASANGLAFPKITLPPQPHTKEGIEAYNNVVAQIVIWVNLNLWQKLKIGRDEAKPLQRLKGFPSFPLVERQANEVDWWDMVCNVKKLINEKKEDGKVFWQNLAGYKRQEALRPYLSSEEDRKKGKKFARYQFGDLLLHLEKKHGEDWGKVYDEAWERIDKKVEGLSKHIKLEEERRSEDAQSKAALTDWLRAKASFVIEGLKEADKDEFCRCELKLQKWYGDLRGKPFAIEAENSILDISGFSKQYNCAFIWQKDGVKKLNLYLIINYFKGGKLRFKKIKPEAFEANRFYTVINKKSGEIVPMEVNFNFDDPNLIILPLAFGKRQGREFIWNDLLSLETGSLKLANGRVIEKTLYNRRTRQDEPALFVALTFERREVLDSSNIKPMNLIGVDRGENIPAVIALTDPEGCPLSRFKDSLGNPTHILRIGESYKEKQRTIQAKKEVEQRRAGGYSRKYASKAKNLADDMVRNTARDLLYYAVTQDAMLIFENLSRGFGRQGKRTFMAERQYTRMEDWLTAKLAYEGLSKTLLSKTLAQYTSKTCSNCGFTITSADYDRVLEKLKKTATGWMTTINGKELKVEGQITYYNRRKRQNVVKDLSVELDRLSEESVNNDISSWTKGRSGEALSLLKKRFSHRPVQEKFVCLNCGFETHADEQAALNIARSWLFLRSQEYKKYQTNKTTGNTDKRAFVETWQSFYRKKLKEVWKPAV

SEQ ID NO: 100 - protein, 977 aa, Artificial Sequence
  CasX Variant
MQEIKRINKIRRRLVKDSNTKKAGKTGPMKTLLVRVMTPDLRERLENLRKKPENIPQPISNTSRANLNKLLTDYTEMKKAILHVYWEEFQKDPVGLMSRVAQPAPKNIDQRKLIPVKDGNERLTSSGFACSQCCQPLYVYKLEQVNDKGKPHTNYFGRCNVSEHERLILLSPHKPEANDELVTYSLGKFGQRALDFYSIHVTRESNHPVKPLEQIGGNSCASGPVGKALSDACMGAVASFLTKYQDIILEHQKVIKKNEKRLANLKDIASANGLAFPKITLPPQPHTKEGIEAYNNVVAQIVIWVNLNLWQKLKIGRDEAKPLQRLKGFPSFPLVERQANEVDWWDMVCNVKKLINEKKEDGKVFWQNLAGYKRQEALRPYLSSEEDRKKGKKFARYQFGDLLKHLEKKHGEDWGKVYDEAWERIDKKVEGLSKHIKLEEERRSEDAQSKAALTDWLRAKASFVIEGLKEADKDEFCRCELKLQKWYGDLRGKPFAIEAENSILDISGFSKQYNCAFIWQKDGVKKLNLYLIINYFKGGKLRFKKIKPEAFEANRFYTVINKKSGEIVPMEVNFNFDDPNLIILPLAFGKRQGREFIWNDLLSLETGSLKLANGRVIEKTLYNRRTRQDEPALFVALTFERREVLDSSNIKPMNLIGVDRGENIPAVIALTDPEGCPLSRFKDSLGNPTHILRIGESYKEKQRTIQAKKEVEQRRAGGYSRKYASKAKNLADDMVRNTARDLLYYAVTQDAMLIFENLSRGFGRQGKRTFMAERQYTRMEDWLTAKLAYEGLSKTLLSKTLAQYTSKTCSNCGFTITSADYDRVLEKLKKTATGWMTTINGKELKVEGQITYYNRRKRQNVVKDLSVELDRLSEESVNNDISSWTKGRSGEALSLLKKRFSHRPVQEKFVCLNCGFETHADEQAALNIARSWLFLRSQEYKKYQTNKTTGNTDKRAFVETWQSFYRKKLKEVWKPAV

SEQ ID NO: 101 - protein, 977 aa, Artificial Sequence
  CasX Variant
MQEIKRINKIRRRLVKDSNTKKAGKTGPMKTLLVRVMTPDLRERLENLRKKPENIPQPISNTSRANLNKLLTDYTEMKKAILHVYWEEFQKDPVGLMSRVAQPAPKNIDQRKLIPVKDGNERLTSSGFACSQCCQPLYVYKLEQVNDKGKPHTNYFGRCNVSEHERLILLSPHKPEANDELVTYSLGKFGQRALDFYSIHVTRESNHPVKPLEQIGGNSCASGPVGKALSDACMGAVASFLTKYQDIILEHQKVIKKNEKRLANLKDIASANGLAFPKITLPPQPHTKEGIEAYNNVVAQIVIWVNLNLWQKLKIGRDEAKPLQRLKGFPSFPLVERQANEVDWWDMVCNVKKLINEKKEDGKVFWQNLAGYKRQEALRPYLSSENDRKKGKKFARYQFGDLLLHLEKKHGEDWGKVYDEAWERIDKKVEGLSKHIKLEEERRSEDAQSKAALTDWLRAKASFVIEGLKEADKDEFCRCELKLQKWYGDLRGKPFAIEAENSILDISGFSKQYNCAFIWQKDGVKKLNLYLIINYFKGGKLRFKKIKPEAFEANRFYTVINKKSGEIVPMEVNFNFDDPNLIILPLAFGKRQGREFIWNDLLSLETGSLKLANGRVIEKTLYNRRTRQDEPALFVALTFERREVLDSSNIKPMNLIGVDRGENIPAVIALTDPEGCPLSRFKDSLGNPTHILRIGESYKEKQRTIQAKKEVEQRRAGGYSRKYASKAKNLADDMVRNTARDLLYYAVTQDAMLIFENLSRGFGRQGKRTFMAERQYTRMEDWLTAKLAYEGLSKTLLSKTLAQYTSKTCSNCGFTITSADYDRVLEKLKKTATGWMTTINGKELKVEGQITYYNRRKRQNVVKDLSVELDRLSEESVNNDISSWTKGRSGEALSLLKKRFSHRPVQEKFVCLNCGFETHADEQAALNIARSWLFLRSQEYKKYQTNKTTGNTDKRAFVETWQSFYRKKLKEVWKPAV

SEQ ID NO: 102 - protein, 977 aa, Artificial Sequence
  CasX Variant
MQEIKRINKIRRRLVKDSNTKKAGKTGPMKTLLVRVMTPDLRERLENLRKKPENIPQPISNTSRANLNKLLTDYTEMKKAILHVYWEEFQKDPVGLMSRVAQPAPKNIDQRKLIPVKDGNERLTSSGFACSQCCQPLYVYKLEQVNDKGKPHTNYFGRCNVSEHERLILLSPHKPEANDELVTYSLGKFGQRALDFYSIHVTRESNHPVKPLEQIGGNSCASGPVGKALSDACMGAVASFLTKYQDIILEHQKVIKKNEKRLANLKDIASANGLAFPKITLPPQPHTKEGIEAYNNVVAQIVIWVNLNLWQKLKIGRDEAKPLQRLKGFPSFPLVERQANEVDWWDMVCNVKKLINEKKEDGKVFWQNLAGYKRQEALRPYLSSENDRKKGKKFARYQFGDLLKHLEKKHGEDWGKVYDEAWERIDKKVEGLSKHIKLEEERRSEDAQSKAALTDWLRAKASFVIEGLKEADKDEFSRCELKLQKWYGDLRGKPFAIEAENSILDISGFSKQYNCAFIWQKDGVKKLNLYLIINYFKGGKLRFKKIKPEAFEANRFYTVINKKSGEIVPMEVNFNFDDPNLIILPLAFGKRQGREFIWNDLLSLETGSLKLANGRVIEKTLYNRRTRQDEPALFVALTFERREVLDSSNIKPMNLIGVDRGENIPAVIALTDPEGCPLSRFKDSLGNPTHILRIGESYKEKQRTIQAKKEVEQRRAGGYSRKYASKAKNLADDMVRNTARDLLYYAVTQDAMLIFENLSRGFGRQGKRTFMAERQYTRMEDWLTAKLAYEGLSKTLLSKTLAQYTSKTCSNCGFTITSADYDRVLEKLKKTATGWMTTINGKELKVEGQITYYNRRKRQNVVKDLSVELDRLSEESVNNDISSWTKGRSGEALSLLKKRFSHRPVQEKFVCLNCGFETHADEQAALNIARSWLFLRSQEYKKYQTNKTTGNTDKRAFVETWQSFYRKKLKEVWKPAV

SEQ ID NO: 103 - protein, 977 aa, Artificial Sequence
  CasX Variant
MQEIKRINKIRRRLVKDSNTKKAGKTGPMKTLLVRVMTPDLRERLENLRKKPENIPQPISNTSRANLNKLLTDYTEMKKAILHVYWEEFQKDPVGLMSRVAQPAPKNIDQRKLIPVKDGNERLTSSGFACSQCCQPLYVYKLEQVNDKGKPHTNYFGRCNVSEHERLILLSPHKPEANDELVTYSLGKFGQRALDFYSIHVTRESNHPVKPLEQIGGNSCASGPVGKALSDACMGAVASFLTKYQDIILEHQKVIKKNEKRLANLKDIASANGLAFPKITLPPQPHTKEGIEAYNNVVAQIVIWVNLNLWQKLKIGRDEAKPLQRLKGFPSFPLVERQANEVDWWDMVCNVKKLINEKKEDGKVFWQNLAGYKRQEALRPYLSSENDRKKGKKFARYQFGDLLLHLEKKHGEDWGKVYDEAWERIDKKVEGLSKHIKLEEERRSEDAQSKAALTDWLRAKASFVIEGLKEADKDEFCRCELKLQKWYGDLRGKPFAIEAENSILDISGFSKQYNCAFIWQKDGVKKLNLYLIINYFKGGKLRFKKIKPEAFEANRFYTVINKKSGEIVPMEVNFNFDDPNLIILPLAFGKRQGREFIWNDLLSLETGSLKLANGRVIEKTLYNRRTRQDEPALFVALTFERREVLDSSNIKPMNLIGIDRGENIPAVIALTDPEGCPLSRFKDSLGNPTHILRIGESYKEKQRTIQAKKEVEQRRAGGYSRKYASKAKNLADDMVRNTARDLLYYAVTQDAMLIFENLSRGFGRQGKRTFMAERQYTRMEDWLTAKLAYEGLSKTYLSKTLAQYTSKTCSNCGFTITSADYDRVLEKLKKTATGWMTTINGKELKVEGQITYYNRRKRQNVVKDLSVELDRLSEESVNNDISSWTKGRSGEALSLLKKRFSHRPVQEKFVCLNCGFETHADEQAALNIARSWLFLRSQEYKKYQTNKTTGNTDKRAFVETWQSFYRKKLKEVWKPAV

SEQ ID NO: 104 - protein, 977 aa, Artificial Sequence
  CasX Variant
MQEIKRINKIRRRLVKDSNTKKAGKTGPMKTLLVRVMTPDLRERLENLRKKPENIPQPISNTSRANLNKLLTDYTEMKKAILHVYWEEFQKDPVGLMSRVAQPAPKNIDQRKLIPVKDGNERLTSSGFACSQCCQPLYVYKLEQVNDKGKPHTNYFGRCNVSEHERLILLSPHKPEANDELVTYSLGKFGQRALDFYSIHVTRESNHPVKPLEQIGGNSCASGPVGKALSDACMGAVASFLTKYQDIILEHQKVIKKNEKRLANLKDIASANGLAFPKITLPPQPHTKEGIEAYNNVVAQIVIWVNLNLWQKLKIGRDEAKPLQRLKGFPSFPLVERQANEVDWWDMVCNVKKLINEKKEDGKVFWQNLAGYKRQEALRPYLSSENDRKKGKKFARYQFGDLLKHLEKKHGEDWGKVYDEAWERIDKKVEGLSKHIKLEEERRSEDAQSKAALTDWLRAKASFVIEGLKEADKDEFCRCELKLQKWYGDLRGKPFAIEAENSILDISGFSKQYNCAFIWQKDGVKKLNLYLIINYFKGGKLRFKKIKPEAFEANRFYTVINKKSGEIVPMEVNFNFDDPNLIILPLAFGKRQGREFIWNDLLSLETGSLKLANGRVIEKTLYNRRTRQDEPALFVALTFERREVLDSSNIKPMNLIGIDRGENIPAVIALTDPEGCPLSRFKDSLGNPTHILRIGESYKEKQRTIQAKKEVEQRRAGGYSRKYASKAKNLADDMVRNTARDLLYYAVTQDAMLIFENLSRGFGRQGKRTFMAERQYTRMEDWLTAKLAYEGLSKTYLSKTLAQYTSKTCSNCGFTITSADYDRVLEKLKKTATGWMTTINGKELKVEGQITYYNRRKRQNVVKDLSVELDRLSEESVNNDISSWTKGRSGEALSLLKKRFSHRPVQEKFVCLNCGFETHADEQAALNIARSWLFLRSQEYKKYQTNKTTGNTDKRAFVETWQSFYRKKLKEVWKPAV

SEQ ID NO: 105 - protein, 977 aa, Artificial Sequence
  CasX Variant
MQEIKRINKIRRRLVKDSNTKKAGKTGPMKTLLVRVMTPDLRERLENLRKKPENIPQPISNTSRANLNKLLTDYTEMKKAILHVYWEEFQKDPVGLMSRVAQPAPKNIDQRKLIPVKDGNERLTSSGFACSQCCQPLYVYKLEQVNDKGKPHTNYFGRCNVSEHERLILLSPHKPEANDELVTYSLGKFGQRALDFYSIHVTRESNHPVKPLEQIGGNSCASGPVGKALSDACMGAVASFLTKYQDIILEHQKVIKKNEKRLANLKDIASANGLAFPKITLPPQPHTKEGIEAYNNVVAQIVIWVNLNLWQKLKIGRDEAKPLQRLKGFPSFPLVERQANEVDWWDMVCNVKKLINEKKEDGKVFWQNLAGYKRQEALRPYLSSPEDRKKGKKFARYQFGDLLLHLEKKHGEDWGKVYDEAWERIDKKVEGLSKHIKLEEERRSEDAQSKAALTDWLRAKASFVIEGLKEADKDEFCRCELKLQKWYGDLRGKPFAIEAENSILDISGFSKQYNCAFIWQKDGVKKLNLYLIINYFKGGKLRFKKIKPEAFEANRFYTVINKKSGEIVPMEVNFNFDDPNLIILPLAFGKRQGREFIWNDLLSLETGSLKLANGRVIEKTLYNRRTRQDEPALFVALTFERREVLDSSNIKPMNLIGIDRGENIPAVIALTDPEGCPLSRFKDSLGNPTHILRIGESYKEKQRTIQAKKEVEQRRAGGYSRKYASKAKNLANDMVRNTARDLLYYAVTQDAMLIFENLSRGFGRQGKRTFMAERQYTRMEDWLTAKLAYEGLSKTYLSKTLAQYTSKTCSNCGFTITSADYDRVLEKLKKTATGWMTTINGKELKVEGQITYYNRRKRQNVVKDLSVELDRLSEESVNNDISSWTKGRSGEALSLLKKRFSHRPVQEKFVCLNCGFETHADEQAALNIARSWLFLRSQEYKKYQTNKTTGNTDKRAFVETWQSFYRKKLKEVWKPAV

SEQ ID NO: 106 - protein, 977 aa, Artificial Sequence
  CasX Variant
MQEIKRINKIRRRLVKDSNTKKAGKTGPMKTLLVRVMTPDLRERLENLRKKPENIPQPISNTSRANLNKLLTDYTEMKKAILHVYWEEFQKDPVGLMSRVAQPAPKNIDQRKLIPVKDGNERLTSSGFACSQCCQPLYVYKLEQVNDKGKPHTNYFGRCNVSEHERLILLSPHKPEANDELVTYSLGKFGQRALDFYSIHVTRESNHPVKPLEQIGGNSCASGPVGKALSDACMGAVASFLTKYQDIILEHQKVIKKNEKRLANLKDIASANGLAFPKITLPPQPHTKEGIEAYNNVVAQIVIWVNLNLWQKLKIGRDEAKPLQRLKGFPSFPLVERQANEVDWWDMVCNVKKLINEKKEDGKVFWQNLAGYKRQEALRPYLSSPEDRKKGKKFARYQFGDLLLHLEKKHGEDWGKVYDEAWERIDKKVEGLSKHIKLEEERRSEDAQSKAALTDWLRAKASFVIEGLKEADKDEFCRCELKLQKWYGDLRGKPFAIEAENSILDISGFSKQYNCAFIWQKDGVKKLNLYLIINYFKGGKLRFKKIKPEAFEANRFYTVINKKSGEIVPMEVNFNFDDPNLIILPLAFGKRQGREFIWNDLLSLETGSLKLANGRVIEKTLYNRRTRQDEPALFVALTFERREVLDSSNIKPMNLIGVDRGENIPAVIALTDPEGCPLSRFKDSLGNPTHILRIGESYKEKQRTIQAKKEVEQRRAGGYSRKYASKAKNLANDMVRNTARDLLYYAVTQDAMLIFENLSRGFGRQGKRTFMAERQYTRMEDWLTAKLAYEGLSKTYLSKTLAQYTSKTCSNCGFTITSADYDRVLEKLKKTATGWMTTINGKELKVEGQITYYNRRKRQNVVKDLSVELDRLSEESVNNDISSWTKGRSGEALSLLKKRFSHRPVQEKFVCLNCGFETHADEQAALNIARSWLFLRSQEYKKYQTNKTTGNTDKRAFVETWQSFYRKKLKEVWKPAV

SEQ ID NO: 107 - protein, 977 aa, Artificial Sequence
  CasX Variant
MQEIKRINKIRRRLVKDSNTKKAGKTGPMKTLLVRVMTPDLRERLENLRKKPENIPQPISNTSRANLNKLLTDYTEMKKAILHVYWEEFQKDPVGLMSRVAQPAPKNIDQRKLIPVKDGNERLTSSGFACSQCCQPLYVYKLEQVNDKGKPHTNYFGRCNVSEHERLILLSPHKPEANDELVTYSLGKFGQRALDFYSIHVTRESNHPVKPLEQIGGNSCASGPVGKALSDACMGAVASFLTKYQDIILEHQKVIKKNEKRLANLKDIASANGLAFPKITLPPQPHTKEGIEAYNNVVAQIVIWVNLNLWQKLKIGRDEAKPLQRLKGFPSFPLVERQANEVDWWDMVCNVKKLINEKKEDGKVFWQNLAGYKRQEALRPYLSSPEDRKKGKKFARYQLGDLLLHLEKKHGEDWGKVYDEAWERIDKKVEGLSKHIKLEEERRSEDAQSKAALTDWLRAKASFVIEGLKEADKDEFCRCELKLQKWYGDLRGKPFAIEAENSILDISGFSKQYNCAFIWQKDGVKKLNLYLIINYFKGGKLRFKKIKPEAFEANRFYTVINKKSGEIVPMEVNFNFDDPNLIILPLAFGKRQGREFIWNDLLSLETGSLKLANGRVIEKTLYNRRTRQDEPALFVALTFERREVLDSSNIKPMNLIGVDRGENIPAVIALTDPEGCPLSRFKDSLGNPTHILRIGESYKEKQRTIQAKKEVEQRRAGGYSRKYASKAKNLANDMVRNTARDLLYYAVTQDAMLIFENLSRGFGRQGKRTFMAERQYTRMEDWLTAKLAYEGLSKTYLSKTLAQYTSKTCSNCGFTITSADYDRVLEKLKKTATGWMTTINGKELKVEGQITYYNRRKRQNVVKDLSVELDRLSEESVNNDISSWTKGRSGEALSLLKKRFSHRPVQEKFVCLNCGFETHADEQAALNIARSWLFLRSQEYKKYQTNKTTGNTDKRAFVETWQSFYRKKLKEVWKPAV

SEQ ID NO: 108 - protein, 977 aa, Artificial Sequence
  CasX Variant
MQEIKRINKIRRRLVKDSNTKKAGKTGPMKTLLVRVMTPDLRERLENLRKKPENIPQPISNTSRANLNKLLTDYTEMKKAILHVYWEEFQKDPVGLMSRVAQPAPKNIDQRKLIPVKDGNERLTSSGFACSQCCQPLYVYKLEQVNDKGKPHTNYFGRCNVSEHERLILLSPHKPEANDELVTYSLGKFGQRALDFYSIHVTRESNHPVKPLEQIGGNSCASGPVGKALSDACMGAVASFLTKYQDIILEHQKVIKKNEKRLANLKDIASANGLAFPKITLPPQPHTKEGIEAYNNVVAQIVIWVNLNLWQKLKIGRDEAKPLQRLKGFPSFPLVERQANEVDWWDMVCNVKKLINEKKEDGKVFWQNLAGYKRQEALRPYLSSPNDRKKGKKFARYQFGDLLLHLEKKHGEDWGKVYDEAWERIDKKVEGLSKHIKLEEERRSEDAQSKAALTDWLRAKASFVIEGLKEADKDEFCRCELKLQKWYGDLRGKPFAIEAENSILDISGFSKQYNCAFIWQKDGVKKLNLYLIINYFKGGKLRFKKIKPEAFEANRFYTVINKKSGEIVPMEVNFNFDDPNLIILPLAFGKRQGREFIWNDLLSLETGSLKLANGRVIEKTLYNRRTRQDEPALFVALTFERREVLDSSNIKPMNLIGVDRGENIPAVIALTDPEGCPLSRFKDSLGNPTHILRIGESYKEKQRTIQAKKEVEQRRAGGYSRKYASKAKNLANDMVRNTARDLLYYAVTQDAMLIFENLSRGFGRQGKRTFMAERQYTRMEDWLTAKLAYEGLSKTYLSKTLAQYTSKTCSNCGFTITSADYDRVLEKLKKTATGWMTTINGKELKVEGQITYYNRRKRQNVVKDLSVELDRLSEESVNNDISSWTKGRSGEALSLLKKRFSHRPVQEKFVCLNCGFETHADEQAALNIARSWLFLRSQEYKKYQTNKTTGNTDKRAFVETWQSFYRKKLKEVWKPAV

SEQ ID NO: 109 - protein, 977 aa, Artificial Sequence
  CasX Variant
MQEIKRINKIRRRLVKDSNTKKAGKTGPMKTLLVRVMTPDLRERLENLRKKPENIPQPISNTSRANLNKLLTDYTEMKKAILHVYWEEFQKDPVGLMSRVAQPAPKNIDQRKLIPVKDGNERLTSSGFACSQCCQPLYVYKLEQVNDKGKPHTNYFGRCNVSEHERLILLSPHKPEANDELVTYSLGKFGQRALDFYSIHVTRESNHPVKPLEQIGGNSCASGPVGKALSDACMGAVASFLTKYQDIILEHQKVIKKNEKRLANLKDIASANGLAFPKITLPPQPHTKEGIEAYNNVVAQIVIWVNLNLWQKLKIGRDEAKPLQRLKGFPSFPLVERQANEVDWWDMVCNVKKLINEKKEDGKVFWQNLAGYKRQEALRPYLSSPEDRKKGKKFARYQFGDLLKHLEKKHGEDWGKVYDEAWERIDKKVEGLSKHIKLEEERRSEDAQSKAALTDWLRAKASFVIEGLKEADKDEFCRCELKLQKWYGDLRGKPFAIEAENSILDISGFSKQYNCAFIWQKDGVKKLNLYLIINYFKGGKLRFKKIKPEAFEANRFYTVINKKSGEIVPMEVNFNFDDPNLIILPLAFGKRQGREFIWNDLLSLETGSLKLANGRVIEKTLYNRRTRQDEPALFVALTFERREVLDSSNIKPMNLIGVDRGENIPAVIALTDPEGCPLSRFKDSLGNPTHILRIGESYKEKQRTIQAKKEVEQRRAGGYSRKYASKAKNLANDMVRNTARDLLYYAVTQDAMLIFENLSRGFGRQGKRTFMAERQYTRMEDWLTAKLAYEGLSKTYLSKTLAQYTSKTCSNCGFTITSADYDRVLEKLKKTATGWMTTINGKELKVEGQITYYNRRKRQNVVKDLSVELDRLSEESVNNDISSWTKGRSGEALSLLKKRFSHRPVQEKFVCLNCGFETHADEQAALNIARSWLFLRSQEYKKYQTNKTTGNTDKRAFVETWQSFYRKKLKEVWKPAV

SEQ ID NO: 110 - protein, 977 aa, Artificial Sequence
  CasX Variant
MQEIKRINKIRRRLVKDSNTKKAGKTGPMKTLLVRVMTPDLRERLENLRKKPENIPQPISNTSRANLNKLLTDYTEMKKAILHVYWEEFQKDPVGLMSRVAQPAPKNIDQRKLIPVKDGNERLTSSGFACSQCCQPLYVYKLEQVNDKGKPHTNYFGRCNVSEHERLILLSPHKPEANDELVTYSLGKFGQRALDFYSIHVTRESNHPVKPLEQIGGNSCASGPVGKALSDACMGAVASFLTKYQDIILEHKKVIKKNEKRLANLKDIASANGLAFPKITLPPQPHTKEGIEAYNNVVAQIVIWVNLNLWQKLKIGRDEAKPLQRLKGFPSFPLVERQANEVDWWDMVCNVKKLINEKKEDGKVFWQNLAGYKRQEALRPYLSSPEDRKKGKKFARYQFGDLLLHLEKKHGEDWGKVYDEAWERIDKKVEGLSKHIKLEEERRSEDAQSKAALTDWLRAKASFVIEGLKEADKDEFCRCELKLQKWYGDLRGKPFAIEAENSILDISGFSKQYNCAFIWQKDGVKKLNLYLIINYFKGGKLRFKKIKPEAFEANRFYTVINKKSGEIVPMEVNFNFDDPNLIILPLAFGKRQGREFIWNDLLSLETGSLKLANGRVIEKPLYNRRTRQDEPALFVALTFERREVLDSSNIKPMNLIGIDRGENIPAVIALTDPEGCPLSRFKDSLGNPTHILRIGESYKEKQRTIQAKKEVEQRRAGGYSRKYASKAKNLADDMVRNTARDLLYYAVTQDAMLIFENLSRGFGRQGKRTFMAERQYTRMEDWLTAKLAYEGLSKTYLSKTLAQYTSKTCSNCGFTITSADYDRVLEKLKKTATGWMTTINGKELKVEGQITYYNRRKRQNVVKDLSVELDRLSEESVNNDISSWTKGRSGEALSLLKKRFSHRPVQEKFVCLNCGFETHADEQAALNIARSWLFLRSQEYKKYQTNKTTGNTDKRAFVETWQSFYRKKLKEVWKPAV

SEQ ID NO: 111 - protein, 977 aa, Artificial Sequence
  CasX Variant
MQEIKRINKIRRRLVKDSNTKKAGKTGPMKTLLVRVMTPDLRERLENLRKKPENIPQPISNTSRANLNKLLTDYTEMKKAILHVYWEEFQKDPVGLMSRVAQPAPKNIDQRKLIPVKDGNERLTSSGFACSQCCQPLYVYKLEQVNDKGKPHTNYFGRCNVSEHERLILLSPHKPEANDELVTYSLGKFGQRALDFYSIHVTRESNHPVKPLEQIGGNSCASGPVGKALSDACMGAVASFLTKYQDIILEHKKVIKKNEKRLANLKDIASANGLAFPKITLPPQPHTKEGIEAYNNVVAQIVIWVNLNLWQKLKIGRDEAKPLQRLKGFPSFPLVERQANEVDWWDMVCNVKKLINEKKEDGKVFWQNLAGYKRQEALRPYLSSPEDRKKGKKFARYQFGDLLLHLEKKHGEDWGKVYDEAWERIDKKVEGLSKHIKLEEERRSEDAQSKAALTDWLRAKASFVIEGLKEADKDEFCRCELKLQKWYGDLRGKPFAIEAENSILDISGFSKQYNCAFIWQKDGVKKLNLYLIINYFKGGKLRFKKIKPEAFEANRFYTVINKKSGEIVPMEVNFNFDDPNLIILPLAFGKRQGREFIWNDLLSLETGSLKLANGRVIEKPLYNRRTRQDEPALFVALTFERREVLDSSNIKPMNLIGVDRGENIPAVIALTDPEGCPLSRFKDSLGNPTHILRIGESYKEKQRTIQAKKEVEQRRAGGYSRKYASKAKNLADDMVRNTARDLLYYAVTQDAMLIFENLSRGFGRQGKRTFMAERQYTRMEDWLTAKLAYEGLSKTYLSKTLAQYTSKTCSNCGFTITSADYDRVLEKLKKTATGWMTTINGKELKVEGQITYYNRRKRQNVVKDLSVELDRLSEESVNNDISSWTKGRSGEALSLLKKRFSHRPVQEKFVCLNCGFETHADEQAALNIARSWLFLRSQEYKKYQTNKTTGNTDKRAFVETWQSFYRKKLKEVWKPAV

SEQ ID NO: 112 - protein, 977 aa, Artificial Sequence
  CasX Variant
MQEIKRINKIRRRLVKDSNTKKAGKTGPMKTLLVRVMTPDLRERLENLRKKPENIPQPISNTSRANLNKLLTDYTEMKKAILHVYWEEFQKDPVGLMSRVAQPAPKNIDQRKLIPVKDGNERLTSSGFACSQCCQPLYVYKLEQVNDKGKPHTNYFGRCNVSEHERLILLSPHKPEANDELVTYSLGKFGQRALDFYSIHVTRESNHPVKPLEQIGGNSCASGPVGKALSDACMGAVASFLTKYQDIILEHKKVIKKNEKRLANLKDIASANGLAFPKITLPPQPHTKEGIEAYNNVVAQIVIWVNLNLWQKLKIGRDEAKPLQRLKGFPSFPLVERQANEVDWWDMVCNVKKLINEKKEDGKVFWQNLAGYKRQEALRPYLSSPNDRKKGKKFARYQFGDLLLHLEKKHGEDWGKVYDEAWERIDKKVEGLSKHIKLEEERRSEDAQSKAALTDWLRAKASFVIEGLKEADKDEFCRCELKLQKWYGDLRGKPFAIEAENSILDISGFSKQYNCAFIWQKDGVKKLNLYLIINYFKGGKLRFKKIKPEAFEANRFYTVINKKSGEIVPMEVNFNFDDPNLIILPLAFGKRQGREFIWNDLLSLETGSLKLANGRVIEKPLYNRRTRQDEPALFVALTFERREVLDSSNIKPMNLIGVDRGENIPAVIALTDPEGCPLSRFKDSLGNPTHILRIGESYKEKQRTIQAKKEVEQRRAGGYSRKYASKAKNLADDMVRNTARDLLYYAVTQDAMLIFENLSRGFGRQGKRTFMAERQYTRMEDWLTAKLAYEGLSKTYLSKTLAQYTSKTCSNCGFTITSADYDRVLEKLKKTATGWMTTINGKELKVEGQITYYNRRKRQNVVKDLSVELDRLSEESVNNDISSWTKGRSGEALSLLKKRFSHRPVQEKFVCLNCGFETHADEQAALNIARSWLFLRSQEYKKYQTNKTTGNTDKRAFVETWQSFYRKKLKEVWKPAV

SEQ ID NO: 113 - protein, 977 aa, Artificial Sequence
  CasX Variant
MQEIKRINKIRRRLVKDSNTKKAGKTGPMKTLLVRVMTPDLRERLENLRKKPENIPQPISNTSRANLNKLLTDYTEMKKAILHVYWEEFQKDPVGLMSRVAQPAPKNIDQRKLIPVKDGNERLTSSGFACSQCCQPLYVYKLEQVNDKGKPHTNYFGRCNVSEHERLILLSPHKPEANDELVTYSLGKFGQRALDFYSIHVTRESNHPVKPLEQIGGNSCASGPVGKALSDACMGAVASFLTKYQDIILEHKKVIKKNEKRLANLKDIASANGLAFPKITLPPQPHTKEGIEAYNNVVAQIVIWVNLNLWQKLKIGRDEAKPLQRLKGFPSFPLVERQANEVDWWDMVCNVKKLINEKKEDGKVFWQNLAGYKRQEALRPYLSSPEDRKKGKKFARYQLGDLLLHLEKKHGEDWGKVYDEAWERIDKKVEGLSKHIKLEEERRSEDAQSKAALTDWLRAKASFVIEGLKEADKDEFCRCELKLQKWYGDLRGKPFAIEAENSILDISGFSKQYNCAFIWQKDGVKKLNLYLIINYFKGGKLRFKKIKPEAFEANRFYTVINKKSGEIVPMEVNFNFDDPNLIILPLAFGKRQGREFIWNDLLSLETGSLKLANGRVIEKPLYNRRTRQDEPALFVALTFERREVLDSSNIKPMNLIGVDRGENIPAVIALTDPEGCPLSRFKDSLGNPTHILRIGESYKEKQRTIQAKKEVEQRRAGGYSRKYASKAKNLADDMVRNTARDLLYYAVTQDAMLIFENLSRGFGRQGKRTFMAERQYTRMEDWLTAKLAYEGLSKTYLSKTLAQYTSKTCSNCGFTITSADYDRVLEKLKKTATGWMTTINGKELKVEGQITYYNRRKRQNVVKDLSVELDRLSEESVNNDISSWTKGRSGEALSLLKKRFSHRPVQEKFVCLNCGFETHADEQAALNIARSWLFLRSQEYKKYQTNKTTGNTDKRAFVETWQSFYRKKLKEVWKPAV

SEQ ID NO: 114 - protein, 977 aa, Artificial Sequence
  CasX Variant
MQEIKRINKIRRRLVKDSNTKKAGKTGPMKTLLVRVMTPDLRERLENLRKKPENIPQPISNTSRANLNKLLTDYTEMKKAILHVYWEEFQKDPVGLMSRVAQPAPKNIDQRKLIPVKDGNERLTSSGFACSQCCQPLYVYKLEQVNDKGKPHTNYFGRCNVSEHERLILLSPHKPEANDELVTYSLGKFGQRALDFYSIHVTRESNHPVKPLEQIGGNSCASGPVGKALSDACMGAVASFLTKYQDIILEHKKVIKKNEKRLANLKDIASANGLAFPKITLPPQPHTKEGIEAYNNVVAQIVIWVNLNLWQKLKIGRDEAKPLQRLKGFPSFPLVERQANEVDWWDMVCNVKKLINEKKEDGKVFWQNLAGYKRQEALRPYLSSPEDRKKGKKFARYQFGDLLKHLEKKHGEDWGKVYDEAWERIDKKVEGLSKHIKLEEERRSEDAQSKAALTDWLRAKASFVIEGLKEADKDEFCRCELKLQKWYGDLRGKPFAIEAENSILDISGFSKQYNCAFIWQKDGVKKLNLYLIINYFKGGKLRFKKIKPEAFEANRFYTVINKKSGEIVPMEVNFNFDDPNLIILPLAFGKRQGREFIWNDLLSLETGSLKLANGRVIEKPLYNRRTRQDEPALFVALTFERREVLDSSNIKPMNLIGVDRGENIPAVIALTDPEGCPLSRFKDSLGNPTHILRIGESYKEKQRTIQAKKEVEQRRAGGYSRKYASKAKNLADDMVRNTARDLLYYAVTQDAMLIFENLSRGFGRQGKRTFMAERQYTRMEDWLTAKLAYEGLSKTYLSKTLAQYTSKTCSNCGFTITSADYDRVLEKLKKTATGWMTTINGKELKVEGQITYYNRRKRQNVVKDLSVELDRLSEESVNNDISSWTKGRSGEALSLLKKRFSHRPVQEKFVCLNCGFETHADEQAALNIARSWLFLRSQEYKKYQTNKTTGNTDKRAFVETWQSFYRKKLKEVWKPAV

SEQ ID NO: 115 - protein, 977 aa, Artificial Sequence
  CasX Variant
MQEIKRINKIRRRLVKDSNTKKAGKTGPMKTLLVRVMTPDLRERLENLRKKPENIPQPISNTSRANLNKLLTDYTEMKKAILHVYWEEFQKDPVGLMSRVAQPAPKNIDQRKLIPVKDGNERLTSSGFACSQCCQPLYVYKLEQVNDKGKPHTNYFGRCNVSEHERLILLSPHKPEANDELVTYSLGKFGQRALDFYSIHVTRESNHPVKPLEQIGGNSCASGPVGKALSDACMGAVASFLTKYQDIILEHQKVIKKNEKRLANLKDIASANGLAFPKITLPPQPHTKEGIEAYNNVVAQIVIWVNLNLWQKLKIGRDEAKPLQRLKGFPSFPLVERQANEVDWWDMVCNVKKLINEKKEDGKVFWQNLAGYKRQEALRPYLSSENDRKKGKKFARYQFGDLLLHLEKKHGEDWGKVYDEAWERIDKKVEGLSKHIKLEEERRSEDAQSKAALTDWLRAKASFVIEGLKEADKDEFCRCELKLQKWYGDLRGKPFAIEAENSILDISGFSKQYNCAFIWQKDGVKKLNLYLIINYFKGGKLRFKKIKPEAFEANRFYTVINKKSGEIVPMEVNFNFDDPNLIILPLAFGKRQGREFIWNDLLSLETGSLKLANGRVIEKPLYNRRTRQDEPALFVALTFERREVLDSSNIKPMNLIGVDRGENIPAVIALTDPEGCPLSRFKDSLGNPTHILRIGESYKEKQRTIQAKKEVEQRRAGGYSRKYASKAKNLADDMVRNTARDLLYYAVTQDAMLIFENLSRGFGRQGKRTFMAERQYTRMEDWLTAKLAYEGLSKTYLSKTLAQYTSKTCSNCGFTITSADYDRVLEKLKKTATGWMTTINGKELKVEGQITYYNRRKRQNVVKDLSVELDRLSEESVNNDISSWTKGRSGEALSLLKKRFSHRPVQEKFVCLNCGFETHADEQAALNIARSWLFLRSQEYKKYQTNKTTGNTDKRAFVETWQSFYRKKLKEVWKPAV

SEQ ID NO: 116 - protein, 977 aa, Artificial Sequence
  CasX Variant
MQEIKRINKIRRRLVKDSNTKKAGKTGPMKTLLVRVMTPDLRERLENLRKKPENIPQPISNTSRANLNKLLTDYTEMKKAILHVYWEEFQKDPVGLMSRVAQPAPKNIDQRKLIPVKDGNERLTSSGFACSQCCQPLYVYKLEQVNDKGKPHTNYFGRCNVSEHERLILLSPHKPEANDELVTYSLGKFGQRALDFYSIHVTRESNHPVKPLEQIGGNSCASGPVGKALSDACMGAVASFLTKYQDIILEHKKVIKKNEKRLANLKDIASANGLAFPKITLPPQPHTKEGIEAYNNVVAQIVIWVNLNLWQKLKIGRDEAKPLQRLKGFPSFPLVERQANEVDWWDMVCNVKKLINEKKEDGKVFWQNLAGYKRQEALRPYLSSPEDRKKGKKFARYQFGDLLLHLEKKHGEDWGKVYDEAWERIDKKVEGLSKHIKLEEERRSEDAQSKAALTDWLRAKASFVIEGLKEADKDEFCRCELKLQKWYGDLRGKPFAIEAENSILDISGFSKQYNCAFIWQKDGVKKLNLYLIINYFKGGKLRFKKIKPEAFEANRFYTVINKKSGEIVPMEVNFNFDDPNLIILPLAFGKRQGREFIWNDLLSLETGSLKLANGRVIEKPLYNRRTRQDEPALFVALTFERREVLDSSNIKPMNLIGIDRGENIPAVIALTDPEGCPLSRFKDSLGNPTHILRIGESYKEKQRTIQAKKEVEQRRAGGYSRKYASKAKNLADDMVRNTARDLLYYAVTQDAMLIFENLSRGFGRQGKRTFMAERQYTRMEDWLTAKLAYEGLSKTYLSKTLAQYTSKTCSNCGFTITSADYDRVLEKLKKTATGWMTTINGKELKVEGQITYYNRYKRQNVVKDLSVELDRLSEESVNNDISSWTKGRSGEALSLLKKRFSHRPVQEKFVCLNCGFETHADEQAALNIARSWLFLRSQEYKKYQTNKTTGNTDKRAFVETWQSFYRKKLKEVWKPAV

SEQ ID NO: 117 - protein, 976 aa, Artificial Sequence
  CasX Variant
QEIKRINKIRRRLVKDSNTKKAGKTGPMKTLLVRVMTPDLRERLENLRKKPENIPQPISNTSRANLNKLLTDYTEMKKAILHVYWEEFQKDPVGLMSRVAQPAPKNIDQRKLIPVKDGNERLTSSGFACSQCCQPLYVYKLEQVNDKGKPHTNYFGRCNVSEHERLILLSPHKPEANDELVTYSLGKFGQRALDFYSIHVTRESNHPVKPLEQIGGNSCASGPVGKALSDACMGAVASFLTKYQDIILEHQKVIKKNEKRLANLKDIASANGLAFPKITLPPQPHTKEGIEAYNNVVAQIVIWVNLNLWQKLKIGRDEAKPLQRLKGFPSFPLVERQANEVDWWDMVCNVKKLINEKKEDGKVFWQNLAGYKRQEALRPYLSSEEDRKKGKKFARYQFGDLLLHLEKKHGEDWGKVYDEAWERIDKKVEGLSKHIKLEEERRSEDAQSKAALTDWLRAKASFVIEGLKEADKDEFCRCELKLQKWYGDLRGKPFAIEAENSILDISGFSKQYNCAFIWQKDGVKKLNLYLIINYFKGGKLRFKKIKPEAFEANRFYTVINKKSGEIVPMEVNFNFDDPNLIILPLAFGKRQGREFIWNDLLSLETGSLKLANGRVIEKTLYNRRTRQDEPALFVALTFERREVLDSSNIKPMNLIGIDRGENIPAVIALTDPEGCPLSRFKDSLGNPTHILRIGESYKEKQRTIQAKKEVEQRRAGGYSRKYASKAKNLADDMVRNTARDLLYYAVTQDAMLIFENLSRGFGRQGKRTFMAERQYTRMEDWLTAKLAYEGLSKTYLSKTLAQYTSKTCSNCGFTITSADYDRVLEKLKKTATGWMTTINGKELKVEGQITYYNRYKRQNVVKDLSVELDRLSEESVNNDISSWTKGRSGEALSLLKKRFSHRPVQEKFVCLNCGFETHADEQAALNIARSWLFLRSQEYKKYQTNKTTGNTDKRAFVETWQSFYRKKLKEVWKPAV

SEQ ID NO: 118 - protein, 977 aa, Artificial Sequence; identical to SEQ ID NO: 72
  CasX Variant

SEQ ID NO: 119 - protein, 977 aa, Artificial Sequence; identical to SEQ ID NO: 72
  CasX Variant

SEQ ID NO: 120 - protein, 977 aa, Artificial Sequence; identical to SEQ ID NO: 72
  CasX Variant

SEQ ID NO: 121 - protein, 977 aa, Artificial Sequence; identical to SEQ ID NO: 72
  CasX Variant

SEQ ID NO: 122 - protein, 977 aa, Artificial Sequence; identical to SEQ ID NO: 72
  CasX Variant

SEQ ID NO: 123 - protein, 978 aa, Artificial Sequence
  CasX Variant
MQEIKRINKIRRRLVKDSNTKKAGKTGPMKTLLVRVMTPDLRERLENLRKKPENIPQPISNTSRANLNKLLTDYTEMKKAILHVYWEEFQKDPVGLMSRVAQPAPKNIDQRKLIPVKDGNERLTMSSGFACSQCCQPLYVYKLEQVNDKGKPHTNYFGRCNVSEHERLILLSPHKPEANDELVTYSLGKFGQRALDFYSIHVTRESNHPVKPLEQIGGNSCASGPVGKALSDACMGAVASFLTKYQDIILEHQKVIKKNEKRLANLKDIASANGLAFPKITLPPQPHTKEGIEAYNNVVAQIVIWVNLNLWQKLKIGRDEAKPLQRLKGFPSFPLVERQANEVDWWDMVCNVKKLINEKKEDGKVFWQNLAGYKRQEALRPYLSSEEDRKKGKKFARYQFGDLLLHLEKKHGEDWGKVYDEAWERIDKKVEGLSKHIKLEEERRSEDAQSKAALTDWLRAKASFVIEGLKEADKDEFCRCELKLQKWYGDLRGKPFAIEAENSILDISGFSKQYNCAFIWQKDGVKKLNLYLIINYFKGGKLRFKKIKPEAFEANRFYTVINKKSGEIVPMEVNFNFDDPNLIILPLAFGKRQGREFIWNDLLSLETGSLKLANGRVIEKTLYNRRTRQDEPALFVALTFERREVLDSSNIKPMNLIGIDRGENIPAVIALTDPEGCPLSRFKDSLGNPTHILRIGESYKEKQRTIQAKKEVEQRRAGGYSRKYASKAKNLADDMVRNTARDLLYYAVTQDAMLIFENLSRGFGRQGKRTFMAERQYTRMEDWLTAKLAYEGLSKTYLSKTLAQYTSKTCSNCGFTITSADYDRVLEKLKKTATGWMTTINGKELKVEGQITYYNRYKRQNVVKDLSVELDRLSEESVNNDISSWTKGRSGEALSLLKKRFSHRPVQEKFVCLNCGFETHADEQAALNIARSWLFLRSQEYKKYQTNKTTGNTDKRAFVETWQSFYRKKLKEVWKPAV

SEQ ID NO: 124 - protein, 977 aa, Artificial Sequence; identical to SEQ ID NO: 72
  CasX Variant

SEQ ID NO: 125 - protein, 977 aa, Artificial Sequence; identical to SEQ ID NO: 72
  CasX Variant

SEQ ID NO: 126 - protein, 977 aa, Artificial Sequence; identical to SEQ ID NO: 72
  CasX Variant

SEQ ID NO: 127 - protein, 977 aa, Artificial Sequence; identical to SEQ ID NO: 72
  CasX Variant

SEQ ID NO: 128 - protein, 977 aa, Artificial Sequence; identical to SEQ ID NO: 72
  CasX Variant

SEQ ID NO: 129 - protein, 977 aa, Artificial Sequence; identical to SEQ ID NO: 72
  CasX Variant

SEQ ID NO: 130 - protein, 977 aa, Artificial Sequence
  CasX Variant
QEIKRINKIRRRLVKDSNTKKAGKTGPMKTLLVRVMTPDLRERLENLRKKPENIPQPISNTSRANLNKLLTDYTEMKKAILHVYWEEFQKDPVGLMSRVAQPASKKIDQNKLKPEMDEKGNLTTAGFACSQCGQPLFVYKLEQVSEKGKAYTNYFGRCNVAEHEKLILLAQLKPEKDSDEAVTYSLGKFGQRALDFYSIHVTRESNHPVKPLEQIGGNSCASGPVGKALSDACMGAVASFLTKYQDIILEHQKVIKKNEKRLANLKDIASANGLAFPKITLPPQPHTKEGIEAYNNVVAQIVIWVNLNLWQKLKIGRDEAKPLQRLKGFPSFPLVERQANEVDWWDMVCNVKKLINEKKEDGKVFWQNLAGYKRQEALRPYLSSEEDRKKGKKFARYQFGDLLLHLEKKHGEDWGKVYDEAWERIDKKVEGLSKHIKLEEERRSEDAQSKAALTDWLRAKASFVIEGLKEADKDEFCRCELKLQKWYGDLRGKPFAIEAENSILDISGFSKQYNCAFIWQKDGVKKLNLYLIINYFKGGKLRFKKIKPEAFEANRFYTVINKKSGEIVPMEVNFNFDDPNLIILPLAFGKRQGREFIWNDLLSLETGSLKLANGRVIEKTLYNRRTRQDEPALFVALTFERREVLDSSNIKPMNLIGIDRGENIPAVIALTDPEGCPLSRFKDSLGNPTHILRIGESYKEKQRTIQAKKEVEQRRAGGYSRKYASKAKNLADDMVRNTARDLLYYAVTQDAMLIFENLSRGFGRQGKRTFMAERQYTRMEDWLTAKLAYEGLSKTYLSKTLAQYTSKTCSNCGFTITSADYDRVLEKLKKTATGWMTTINGKELKVEGQITYYNRYKRQNVVKDLSVELDRLSEESVNNDISSWTKGRSGEALSLLKKRFSHRPVQEKFVCLNCGFETHADEQAALNIARSWLFLRSQEYKKYQTNKTTGNTDKRAFVETWQSFYRKKLKEVWKPAV

SEQ ID NO: 131 - protein, 976 aa, Artificial Sequence
  CasX Variant
QEIKRINKIRRRLVKDSNTKKAGKTGPMKTLLVRVMTPDLRERLENLRKKPENIPQPISNTSRANLNKLLTDYTEMKKAILHVYWEEFQKDPVGLMSRVAQPAPKNIDQRKLIPVKDGNERLTSSGFACSQCCQPLYVYKLEQVNDKGKPHTNYFGRCNVSEHERLILLSPHKPEANDELVTYSLGKFGQRALDFYSIHVTKESTHPVKPLAQIAGNRYASGPVGKALSDACMGTIASFLSKYQDIIIEHQKVVKGNQKRLESLRELAGKENLEYPSVTLPPQPHTKEGVDAYNEVIARVRMWVNLNLWQKLKLSRDDAKPLLRLKGFPSFPLVERQANEVDWWDMVCNVKKLINEKKEDGKVFWQNLAGYKRQEALRPYLSSEEDRKKGKKFARYQFGDLLLHLEKKHGEDWGKVYDEAWERIDKKVEGLSKHIKLEEERRSEDAQSKAALTDWLRAKASFVIEGLKEADKDEFCRCELKLQKWYGDLRGKPFAIEAENSILDISGFSKQYNCAFIWQKDGVKKLNLYLIINYFKGGKLRFKKIKPEAFEANRFYTVINKKSGEIVPMEVNFNFDDPNLIILPLAFGKRQGREFIWNDLLSLETGSLKLANGRVIEKTLYNRRTRQDEPALFVALTFERREVLDSSNIKPMNLIGIDRGENIPAVIALTDPEGCPLSRFKDSLGNPTHILRIGESYKEKQRTIQAKKEVEQRRAGGYSRKYASKAKNLADDMVRNTARDLLYYAVTQDAMLIFENLSRGFGRQGKRTFMAERQYTRMEDWLTAKLAYEGLSKTYLSKTLAQYTSKTCSNCGFTITSADYDRVLEKLKKTATGWMTTINGKELKVEGQITYYNRYKRQNVVKDLSVELDRLSEESVNNDISSWTKGRSGEALSLLKKRFSHRPVQEKFVCLNCGFETHADEQAALNIARSWLFLRSQEYKKYQTNKTTGNTDKRAFVETWQSFYRKKLKEVWKPAV

SEQ ID NO: 132 - protein, 976 aa, Artificial Sequence
  CasX Variant
QEIKRINKIRRRLVKDSNTKKAGKTGPMKTLLVRVMTPDLRERLENLRKKPENIPQPISNTSRANLNKLLTDYTEMKKAILHVYWEEFQKDPVGLMSRVAQPAPKNIDQRKLIPVKDGNERLTSSGFACSQCCQPLYVYKLEQVNDKGKPHTNYFGRCNVSEHERLILLSPHKPEANDELVTYSLGKFGQRALDFYSIHVTKESTHPVKPLAQIAGNRYASGPVGKALSDACMGTIASFLSKYQDIIIEHQKVVKGNQKRLESLRELAGKENLEYPSVTLPPQPHTKEGVDAYNEVIARVRMWVNLNLWQKLKLSRDDAKPLLRLKGFPSFPLVERQANEVDWWDMVCNVKKLINEKKEDGKVFWQNLAGYKRQEALRPYLSSEEDRKKGKKFARYQLGDLLLHLEKKHGEDWGKVYDEAWERIDKKVEGLSKHIKLEEERRSEDAQSKAALTDWLRAKASFVIEGLKEADKDEFCRCELKLQKWYGDLRGKPFAIEAENSILDISGFSKQYNCAFIWQKDGVKKLNLYLIINYFKGGKLRFKKIKPEAFEANRFYTVINKKSGEIVPMEVNFNFDDPNLIILPLAFGKRQGREFIWNDLLSLETGSLKLANGRVIEKTLYNRRTRQDEPALFVALTFERREVLDSSNIKPMNLIGVDRGENIPAVIALTDPEGCPLSRFKDSLGNPTHILRIGESYKEKQRTIQAKKEVEQRRAGGYSRKYASKAKNLADDMVRNTARDLLYYAVTQDAMLIFENLSRGFGRQGKRTFMAERQYTRMEDWLTAKLAYEGLSKTYLSKTLAQYTSKTCSNCGFTITSADYDRVLEKLKKTATGWMTTINGKELKVEGQITYYNRRKRQNVVKDLSVELDRLSEESVNNDISSWTKGRSGEALSLLKKRFSHRPVQEKFVCLNCGFETHADEQAALNIARSWLFLRSQEYKKYQTNKTTGNTDKRAFVETWQSFYRKKLKEVWKPAV

SEQ ID NO: 133 - protein, 976 aa, Artificial Sequence
  CasX Variant
QEIKRINKIRRRLVKDSNTKKAGKTGPMKTLLVRVMTPDLRERLENLRKKPENIPQPISNTSRANLNKLLTDYTEMKKAILHVYWEEFQKDPVGLMSRVAQPAPKNIDQRKLIPVKDGNERLTSSGFACSQCCQPLYVYKLEQVNDKGKPHTNYFGRCNVSEHERLILLSPHKPEANDELVTYSLGKFGQRALDFYSIHVTKESTHPVKPLAQIAGNRYASGPVGKALSDACMGTIASFLSKYQDIIIEHQKVVKGNQKRLESLRELAGKENLEYPSVTLPPQPHTKEGVDAYNEVIARVRMWVNLNLWQKLKLSRDDAKPLLRLKGFPSFPLVERQANEVDWWDMVCNVKKLINEKKEDGKVFWQNLAGYKRQEALRPYLSSEEDRKKGKKFARYQLGDLLKHLEKKHGEDWGKVYDEAWERIDKKVEGLSKHIKLEEERRSEDAQSKAALTDWLRAKASFVIEGLKEADKDEFCRCELKLQKWYGDLRGKPFAIEAENSILDISGFSKQYNCAFIWQKDGVKKLNLYLIINYFKGGKLRFKKIKPEAFEANRFYTVINKKSGEIVPMEVNFNFDDPNLIILPLAFGKRQGREFIWNDLLSLETGSLKLANGRVIEKTLYNRRTRQDEPALFVALTFERREVLDSSNIKPMNLIGVDRGENIPAVIALTDPEGCPLSRFKDSLGNPTHILRIGESYKEKQRTIQAKKEVEQRRAGGYSRKYASKAKNLADDMVRNTARDLLYYAVTQDAMLIFENLSRGFGRQGKRTFMAERQYTRMEDWLTAKLAYEGLSKTYLSKTLAQYTSKTCSNCGFTITSADYDRVLEKLKKTATGWMTTINGKELKVEGQITYYNRRKRQNVVKDLSVELDRLSEESVNNDISSWTKGRSGEALSLLKKRFSHRPVQEKFVCLNCGFETHADEQAALNIARSWLFLRSQEYKKYQTNKTTGNTDKRAFVETWQSFYRKKLKEVWKPAV

SEQ ID NO: 134 - protein, 976 aa, Artificial Sequence
  CasX Variant
QEIKRINKIRRRLVKDSNTKKAGKTGPMKTLLVRVMTPDLRERLENLRKKPENIPQPISNTSRANLNKLLTDYTEMKKAILHVYWEEFQKDPVGLMSRVAQPAPKNIDQRKLIPVKDGNERLTSSGFACSQCCQPLYVYKLEQVNDKGKPHTNYFGRCNVSEHERLILLSPHKPEANDELVTYSLGKFGQRALDFYSIHVTKESTHPVKPLAQIAGNRYASGPVGKALSDACMGTIASFLSKYQDIIIEHQKVVKGNQKRLESLRELAGKENLEYPSVTLPPQPHTKEGVDAYNEVIARVRMWVNLNLWQKLKLSRDDAKPLLRLKGFPSFPLVERQANEVDWWDMVCNVKKLINEKKEDGKVFWQNLAGYKRQEALRPYLSSEEDRKKGKKFARYQLGDLLLHLEKKHGEDWGKVYDEAWERIDKKVEGLSKHIKLEEERRSEDAQSKAALTDWLRAKASFVIEGLKEADKDEFCRCELKLQKWYGDLRGKPFAIEAENSILDISGFSKQYNCAFIWQKDGVKKLNLYLIINYFKGGKLRFKKIKPEAFEANRFYTVINKKSGEIVPMEVNFNFDDPNLIILPLAFGKRQGREFIWNDLLSLETGSLKLANGRVIEKTLYNRRTRQDEPALFVALTFERREVLDSSNIKPMNLIGVDRGENIPAVIALTDPEGCPLSRFKDSLGNPTHILRIGESYKEKQRTIQAKKEVEQRRAGGYSRKYASKAKNLADDMVRNTARDLLYYAVTQDAMLIFENLSRGFGRQGKRTFMAERQYTRMEDWLTAKLAYEGLSKTYLSKTLAQYTSKTCSNCGFTITSADYDRVLEKLKKTATGWMTTINGKELKVEGQITYYNRYKRQNVVKDLSVELDRLSEESVNNDISSWTKGRSGEALSLLKKRFSHRPVQEKFVCLNCGFETHADEQAALNIARSWLFLRSQEYKKYQTNKTTGNTDKRAFVETWQSFYRKKLKEVWKPAV

SEQ ID NO: 135 - protein, 977 aa, Artificial Sequence
  CasX Variant
QEIKRINKIRRRLVKDSNTKKAGKTGPMKTLLVRVMTPDLRERLENLRKKPENIPQPISNTSRANLNKLLTDYTEMKKAILHVYWEEFQKDPVGLMSRVAQPASKKIDQNKLKPEMDEKGNLTTAGFACSQCGQPLFVYKLEQVSEKGKAYTNYFGRCNVAEHEKLILLAQLKPEKDSDEAVTYSLGKFGQRALDFYSIHVTKESTHPVKPLAQIAGNRYASGPVGKALSDACMGTIASFLSKYQDIIIEHQKVVKGNQKRLESLRELAGKENLEYPSVTLPPQPHTKEGVDAYNEVIARVRMWVNLNLWQKLKLSRDDAKPLLRLKGFPSFPLVERQANEVDWWDMVCNVKKLINEKKEDGKVFWQNLAGYKRQEALRPYLSSEEDRKKGKKFARYQFGDLLLHLEKKHGEDWGKVYDEAWERIDKKVEGLSKHIKLEEERRSEDAQSKAALTDWLRAKASFVIEGLKEADKDEFCRCELKLQKWYGDLRGKPFAIEAENSILDISGFSKQYNCAFIWQKDGVKKLNLYLIINYFKGGKLRFKKIKPEAFEANRFYTVINKKSGEIVPMEVNFNFDDPNLIILPLAFGKRQGREFIWNDLLSLETGSLKLANGRVIEKTLYNRRTRQDEPALFVALTFERREVLDSSNIKPMNLIGIDRGENIPAVIALTDPEGCPLSRFKDSLGNPTHILRIGESYKEKQRTIQAKKEVEQRRAGGYSRKYASKAKNLADDMVRNTARDLLYYAVTQDAMLIFENLSRGFGRQGKRTFMAERQYTRMEDWLTAKLAYEGLSKTYLSKTLAQYTSKTCSNCGFTITSADYDRVLEKLKKTATGWMTTINGKELKVEGQITYYNRYKRQNVVKDLSVELDRLSEESVNNDISSWTKGRSGEALSLLKKRFSHRPVQEKFVCLNCGFETHADEQAALNIARSWLFLRSQEYKKYQTNKTTGNTDKRAFVETWQSFYRKKLKEVWKPAV

SEQ ID NO: 136 - protein, 977 aa, Artificial Sequence
  CasX Variant
QEIKRINKIRRRLVKDSNTKKAGKTGPMKTLLVRVMTPDLRERLENLRKKPENIPQPISNTSRANLNKLLTDYTEMKKAILHVYWEEFQKDPVGLMSRVAQPASKKIDQNKLKPEMDEKGNLTTAGFACSQCGQPLFVYKLEQVSEKGKAYTNYFGRCNVAEHEKLILLAQLKPEKDSDEAVTYSLGKFGQRALDFYSIHVTKESTHPVKPLAQIAGNRYASGPVGKALSDACMGTIASFLSKYQDIIIEHQKVVKGNQKRLESLRELAGKENLEYPSVTLPPQPHTKEGVDAYNEVIARVRMWVNLNLWQKLKLSRDDAKPLLRLKGFPSFPLVERQANEVDWWDMVCNVKKLINEKKEDGKVFWQNLAGYKRQEALRPYLSSEEDRKKGKKFARYQLGDLLLHLEKKHGEDWGKVYDEAWERIDKKVEGLSKHIKLEEERRSEDAQSKAALTDWLRAKASFVIEGLKEADKDEFCRCELKLQKWYGDLRGKPFAIEAENSILDISGFSKQYNCAFIWQKDGVKKLNLYLIINYFKGGKLRFKKIKPEAFEANRFYTVINKKSGEIVPMEVNFNFDDPNLIILPLAFGKRQGREFIWNDLLSLETGSLKLANGRVIEKTLYNRRTRQDEPALFVALTFERREVLDSSNIKPMNLIGVDRGENIPAVIALTDPEGCPLSRFKDSLGNPTHILRIGESYKEKQRTIQAKKEVEQRRAGGYSRKYASKAKNLADDMVRNTARDLLYYAVTQDAMLIFENLSRGFGRQGKRTFMAERQYTRMEDWLTAKLAYEGLSKTYLSKTLAQYTSKTCSNCGFTITSADYDRVLEKLKKTATGWMTTINGKELKVEGQITYYNRRKRQNVVKDLSVELDRLSEESVNNDISSWTKGRSGEALSLLKKRFSHRPVQEKFVCLNCGFETHADEQAALNIARSWLFLRSQEYKKYQTNKTTGNTDKRAFVETWQSFYRKKLKEVWKPAV

SEQ ID NO: 137 - protein, 977 aa, Artificial Sequence
  CasX Variant
QEIKRINKIRRRLVKDSNTKKAGKTGPMKTLLVRVMTPDLRERLENLRKKPENIPQPISNTSRANLNKLLTDYTEMKKAILHVYWEEFQKDPVGLMSRVAQPASKKIDQNKLKPEMDEKGNLTTAGFACSQCGQPLFVYKLEQVSEKGKAYTNYFGRCNVAEHEKLILLAQLKPEKDSDEAVTYSLGKFGQRALDFYSIHVTKESTHPVKPLAQIAGNRYASGPVGKALSDACMGTIASFLSKYQDIIIEHQKVVKGNQKRLESLRELAGKENLEYPSVTLPPQPHTKEGVDAYNEVIARVRMWVNLNLWQKLKLSRDDAKPLLRLKGFPSFPLVERQANEVDWWDMVCNVKKLINEKKEDGKVFWQNLAGYKRQEALRPYLSSEEDRKKGKKFARYQLGDLLKHLEKKHGEDWGKVYDEAWERIDKKVEGLSKHIKLEEERRSEDAQSKAALTDWLRAKASFVIEGLKEADKDEFCRCELKLQKWYGDLRGKPFAIEAENSILDISGFSKQYNCAFIWQKDGVKKLNLYLIINYFKGGKLRFKKIKPEAFEANRFYTVINKKSGEIVPMEVNFNFDDPNLIILPLAFGKRQGREFIWNDLLSLETGSLKLANGRVIEKTLYNRRTRQDEPALFVALTFERREVLDSSNIKPMNLIGVDRGENIPAVIALTDPEGCPLSRFKDSLGNPTHILRIGESYKEKQRTIQAKKEVEQRRAGGYSRKYASKAKNLADDMVRNTARDLLYYAVTQDAMLIFENLSRGFGRQGKRTFMAERQYTRMEDWLTAKLAYEGLSKTYLSKTLAQYTSKTCSNCGFTITSADYDRVLEKLKKTATGWMTTINGKELKVEGQITYYNRRKRQNVVKDLSVELDRLSEESVNNDISSWTKGRSGEALSLLKKRFSHRPVQEKFVCLNCGFETHADEQAALNIARSWLFLRSQEYKKYQTNKTTGNTDKRAFVETWQSFYRKKLKEVWKPAV

SEQ ID NO: 138 - protein, 977 aa, Artificial Sequence
  CasX Variant
QEIKRINKIRRRLVKDSNTKKAGKTGPMKTLLVRVMTPDLRERLENLRKKPENIPQPISNTSRANLNKLLTDYTEMKKAILHVYWEEFQKDPVGLMSRVAQPASKKIDQNKLKPEMDEKGNLTTAGFACSQCGQPLFVYKLEQVSEKGKAYTNYFGRCNVAEHEKLILLAQLKPEKDSDEAVTYSLGKFGQRALDFYSIHVTKESTHPVKPLAQIAGNRYASGPVGKALSDACMGTIASFLSKYQDIIIEHQKVVKGNQKRLESLRELAGKENLEYPSVTLPPQPHTKEGVDAYNEVIARVRMWVNLNLWQKLKLSRDDAKPLLRLKGFPSFPLVERQANEVDWWDMVCNVKKLINEKKEDGKVFWQNLAGYKRQEALRPYLSSEEDRKKGKKFARYQLGDLLLHLEKKHGEDWGKVYDEAWERIDKKVEGLSKHIKLEEERRSEDAQSKAALTDWLRAKASFVIEGLKEADKDEFCRCELKLQKWYGDLRGKPFAIEAENSILDISGFSKQYNCAFIWQKDGVKKLNLYLIINYFKGGKLRFKKIKPEAFEANRFYTVINKKSGEIVPMEVNFNFDDPNLIILPLAFGKRQGREFIWNDLLSLETGSLKLANGRVIEKTLYNRRTRQDEPALFVALTFERREVLDSSNIKPMNLIGVDRGENIPAVIALTDPEGCPLSRFKDSLGNPTHILRIGESYKEKQRTIQAKKEVEQRRAGGYSRKYASKAKNLADDMVRNTARDLLYYAVTQDAMLIFENLSRGFGRQGKRTFMAERQYTRMEDWLTAKLAYEGLSKTYLSKTLAQYTSKTCSNCGFTITSADYDRVLEKLKKTATGWMTTINGKELKVEGQITYYNRYKRQNVVKDLSVELDRLSEESVNNDISSWTKGRSGEALSLLKKRFSHRPVQEKFVCLNCGFETHADEQAALNIARSWLFLRSQEYKKYQTNKTTGNTDKRAFVETWQSFYRKKLKEVWKPAV

SEQ ID NO: 139 - protein, 977 aa, Artificial Sequence
  CasX Variant
QEIKRINKIRRRLVKDSNTKKAGKTGPMKTLLVRVMTPDLRERLENLRKKPENIPQPISNTSRANLNKLLTDYTEMKKAILHVYWEEFQKDPVGLMSRVAQPASKKIDQNKLKPEMDEKGNLTTAGFACSQCGQPLFVYKLEQVSEKGKAYTNYFGRCNVAEHEKLILLAQLKPEKDSDEAVTYSLGKFGQRALDFYSIHVTRESNHPVKPLEQIGGNSCASGPVGKALSDACMGAVASFLTKYQDIILEHQKVIKKNEKRLANLKDIASANGLAFPKITLPPQPHTKEGIEAYNNVVAQIVIWVNLNLWQKLKIGRDEAKPLQRLKGFPSFPLVERQANEVDWWDMVCNVKKLINEKKEDGKVFWQNLAGYKRQEALRPYLSSEEDRKKGKKFARYQLGDLLLHLEKKHGEDWGKVYDEAWERIDKKVEGLSKHIKLEEERRSEDAQSKAALTDWLRAKASFVIEGLKEADKDEFCRCELKLQKWYGDLRGKPFAIEAENSILDISGFSKQYNCAFIWQKDGVKKLNLYLIINYFKGGKLRFKKIKPEAFEANRFYTVINKKSGEIVPMEVNFNFDDPNLIILPLAFGKRQGREFIWNDLLSLETGSLKLANGRVIEKTLYNRRTRQDEPALFVALTFERREVLDSSNIKPMNLIGVDRGENIPAVIALTDPEGCPLSRFKDSLGNPTHILRIGESYKEKQRTIQAKKEVEQRRAGGYSRKYASKAKNLADDMVRNTARDLLYYAVTQDAMLIFENLSRGFGRQGKRTFMAERQYTRMEDWLTAKLAYEGLSKTYLSKTLAQYTSKTCSNCGFTITSADYDRVLEKLKKTATGWMTTINGKELKVEGQITYYNRYKRQNVVKDLSVELDRLSEESVNNDISSWTKGRSGEALSLLKKRFSHRPVQEKFVCLNCGFETHADEQAALNIARSWLFLRSQEYKKYQTNKTTGNTDKRAFVETWQSFYRKKLKEVWKPAV

SEQ ID NO: 140 - protein, 978 aa, Artificial Sequence
  CasX Variant
MQEIKRINKIRRRLVKDSNTKKAGKTGPMKTLLVRVMTPDLRERLENLRKKPENIPQPISNTSRANLNKLLTDYTEMKKAILHVYWEEFQKDPVGLMSRVAQPAPKNIDQRKLIPVKDGNERLTSSGFACSQCCQPLYVYKLEQVNDKGKPHTNYFGRCNVSEHERLILLSPHKPEANDELVTYSLGKFGQRALDFYSIHVTRESNHPVKPLEQIGGNSCASGPVGKALSDACMGAVASFLTKYQDIILEHQKVIKKNEKRLANLKDIASANGLAFPKITLPPQPHTKEGIEAYNNVVAQIVIWVNLNLWQKLKIGRDEAKPLQRLKGFPSFPLVERQANEVDWWDMVCNVKKLINEKKEDGKVFWQNLAGYKRQEALLPYLSSEEDRKKGKKFARYQFGDLLLHLEKKHGEDWGKVYDEAWERIDKKVEGLSKHIKLEEERRSEDAQSKAALTDWLRAKASFVIEGLKEADKDEFCRCELKLQKWYGDLRGKPFAIEAENSILDISGFSKQYNCAFIWQKDGVKKLNLYLIINYFKGGKLRFKKIKPEAFEANRFYTVINKKSGEIVPMEVNFNFDDPNLIILPLAFGKRQGREFIWNDLLSLETGSLKLANGRVIEKTLYNRRTRQDEPALFVALTFERREVLDSSNIKPMNLIGIDRGENIPAVIALTDPEGCPLSRFKDSLGNPTHILRIGESYKEKQRTIQAAKEVEQRRAGGYSRKYASKAKNLADDMVRNTARDLLYYAVTQDAMLIFENLSRGFGRQGKRTFMAERQYTRMEDWLTAKLAYEGLPSKTYLSKTLAQYTSKTCSNCGFTITSADYDRVLEKLKKTATGWMTTINGKELKVEGQITYYNRYKRQNVVKDLGVELDRLSEESVNNDISSWTKGRSGEALSLLKKRFSHRPVQEKFVCLNCGFETHADEQAALNIARSWLFLRSQEYKKYQTNKTTGNTDKRAFVETWQSFYRKKLKEVWKPAV

SEQ ID NO: 141 - protein, 986 aa, Artificial Sequence; identical to SEQ ID NO: 56
  CasX Variant

SEQ ID NO: 142 - protein, 978 aa, Artificial Sequence
  CasX Variant
MQEIKRINKIRRRLVKDSNTKKAGKTGPMKTLLVRVMTPDLRERLENLRKKPENIPQPISNTSRANLNKLLTDYTEMKKAILHVYWEEFQKDPVGLMSRVAQPAPKNIDQRKLIPVKDGNERLTSSGFACSQCCQPLYVYKLEQVNDKGKPHTNYFGRCNVSEHERLILLSPHKPEANDELVTYSLGKFGQRALDFYSIHVTRESNHPVKPLEQIGGNSCASGPVGKALSDACMGAVASFLTKYQDIILEHQKVIKKNEKRLANLKDIASANGLAFPKITLPPQPHTKEGIEAYNNVVAQIVIWVNLNLWQKLKIGRDEAKPLQRLKGFPSFPLVERQANEVDWWDMVCNVKKLINEKKEDGKVFWQNLAGYKRQEALRPYLSSEEDRKKGKKFARYQFGDLLLHLEKKHGEDWGKVYDEAWERIDKKVEGLSKHIKLEEERRSEDAQSKAALTDWLRAKASFVIEGLKEADKDEFCRCELKLQKWYGDLRGKPFAIEAENSILDISGFSKQYNCAFIWQKDGVKKLNLYLIINYFKGGKLRFKKIKPEAFEANRFYTVINKKSGEIVPMEVNFNFDDPNLIILPLAFGKRQGREFIWNDLLSLETGSLKLANGRVIEKTLYNRRTRQDEPALFVALTFERREVLDSSNIKPVNLIGVDRGENIPAVIALTDPEGCPLPEFKDSSGGPTDILRIGEGYKEKQRAIQAAKEVEQRRAGGYSRKFASKSRNLADDMVRNSARDLFYHAVTHDAVLVFENLSRGFGRQGKRTFMTERQYTKMEDWLTAKLAYEGLTSKTYLSKTLAQYTSKTCSNCGFTITSADYDRVLEKLKKTATGWMTTINGKELKVEGQITYYNRYKRQNVVKDLSVELDRLSEESVNNDISSWTKGRSGEALSLLKKRFSHRPVQEKFVCLNCGFETHADEQAALNIARSWLFLRSQEYKKYQTNKTTGNTDKRAFVETWQSFYRKKLKEVWKPAV

SEQ ID NO: 143 - protein, 972 aa, Artificial Sequence
  CasX Variant
MQEIKRINKIRRRLVKDSNTKKAGKTGPMKTLLVRVMTPDLRERLENLRKKPENIPQPISNTSRANLNKLLTDYTEMKKAILHVYWEEFQKDPVGLMSRVAQPAPKNIDQRKLIPVKDGNERLTSSGFACSQCCQPLYVYKLEQVNDKGKPHTNYFGRCNVSEHERLILLSPHKPEANDELVTYSLGKFGQRALDFYSIHVTRESNHPVKPLEQIGGNSCASGPVGKALSDACMGAVASFLTKYQDIILEHQKVIKKNEKRLANLKDIASANGLAFPKITLPPQPHTKEGIEAYNNVVAQIVIWVNLNLWQKLKIGRDEAKPLQRLKGFPSFPLVERQANEVDWWDMVCNVKKLINEKKEDGKVFWQNLAGYKRQEALRPYLSSEEDRKKGKKFARYQFGDLLLHLEKKHGEDWGKVYDEAWERIDKKVEGLSKHIKLEEERRSEDAQSKAALTDWLRAKASFVIEGLKEADKDEFCRCELKLQKWYGDLRGKPFAIEAENSILDISGFSKQYNCAFIWQKDGVKKLNLYLIINYFKGGKLRFKKIKPEAFEANRFYTVINKKSGEIVPMEVNFNFDDPNLIILPLAFGKRQGREFIWNDLLSLETGSLKLANGRVIEKTLYNRRTRQDEPALFVALTFERREVLDSSNIKPMNLIGIDRGENIPAVIALTDPEGCPLSRFKDSLGNPTHILRIGESYKEKQRTIQAKKEVEQRRAGGYSRKYASKAKNLADDMVRNTARDLLYYAVTQDAMLIFENLSRGFGRQGKRTFMAERQYTRMEDWLTAKLAYEGLSKTYLSKTLAQYTSKTCSNCGFTITSADYDRVLEKLKKTATGWMTTINGKELKVEGQITYYNRYKRQNVVKDLSVELDRLSEESVNNDISSWTKGRSGEALSLLKKRFSHRPVQEKFVCLNCGFETHADEQAALNIARSWLFLNSNSTEFKSYKSGKQPFVGAWQAFYKRRLKEVWKPNA

SEQ ID NO: 144 - protein, 978 aa, Artificial Sequence
  CasX Variant
QEIKRINKIRRRLVKDSNTKKAGKTGPMKTLLVRVMTPDLRERLENLRKKPENIPQPISNTSRANLNKLLTDYTEMKKAILHVYWEEFQKDPVGLMSRVAQPASKKIDQNKLKPEMDEKGNLTTAGFACSQCGQPLFVYKLEQVSEKGKAYTNYFGRCNVAEHEKLILLAQLKPEKDSDEAVTYSLGKFGQRALDFYSIHVTKESTHPVKPLAQIAGNRYASGPVGKALSDACMGTIASFLSKYQDIIIEHQKVVKGNQKRLESLRELAGKENLEYPSVTLPPQPHTKEGVDAYNEVIARVRMWVNLNLWQKLKLSRDDAKPLLRLKGFPSFPLVERQANEVDWWDMVCNVKKLINEKKEDGKVFWQNLAGYKRQEALRPYLSSEEDRKKGKKFARYQLGDLLLHLEKKHGEDWGKVYDEAWERIDKKVEGLSKHIKLEEERRSEDAQSKAALTDWLRAKASFVIEGLKEADKDEFCRCELKLQKWYGDLRGKPFAIEAENSILDISGFSKQYNCAFIWQKDGVKKLNLYLIINYFKGGKLRFKKIKPEAFEANRFYTVINKKSGEIVPMEVNFNFDDPNLIILPLAFGKRQGREFIWNDLLSLETGSLKLANGRVIEKTLYNRRTRQDEPALFVALTFERREVLDSSNIKPMNLIGVDRGENIPAVIALTDPEGCPLSRFKDSLGNPTHILRIGESYKEKQRTIQAKKEVEQRRAGGYSRKYASKAKNLADDMVRNTARDLLYYAVTQDAMLIFENLSRGFGRQGKRTFMAERQYTRMEDWLTAKLAYEGLSKTYLSKTLAQYTSKTCSNCGFTIHTSADYDRVLEKLKKTATGWMTTINGKELKVEGQITYYNRYKRQNVVKDLSVELDRLSEESVNNDISSWTKGRSGEALSLLKKRFSHRPVQEKFVCLNCGFETHADEQAALNIARSWLFLRSQEYKKYQTNKTTGNTDKRAFVETWQSFYRKKLKEVWKPAV

SEQ ID NO: 145 - protein, 978 aa, Artificial Sequence
  CasX Variant
QEIKRINKIRRRLVKDSNTKKAGKTGPMKTLLVRVMTPDLRERLENLRKKPENIPQPISNTSRANLNKLLTDYTEMKKAILHVYWEEFQKDPVGLMSRVAQPASKKIDQNKLKPEMDEKGNLTTAGFACSQCGQPLFVYKLEQVSEKGKAYTNYFGRCNVAEHEKLILLAQLKPEKDSDEAVTYSLGKFGQRALDFYSIHVTKESTHPVKPLAQIAGNRYASGPVGKALSDACMGTIASFLSKYQDIIIEHQKVVKGNQKRLESLRELAGKENLEYPSVTLPPQPHTKEGVDAYNEVIARVRMWVNLNLWQKLKLSRDDAKPLLRLKGFPSFPLVERQANEVDWWDMVCNVKKLINEKKEDGKVFWQNLAGYKRQEALRPYLSSEEDRKKGKKFARYQLGDLLLHLEKKHGEDWGKVYDEAWERIDKKVEGLSKHIKLEEERRSEDAQSKAALTDWLRAKASFVIEGLKEADKDEFCRCELKLQKWYGDLRGKPFAIEAENSILDISGFSKQYNCAFIWQKDGVKKLNLYLIINYFKGGKLRFKKIKPEAFEANRFYTVINKKSGEIVPMEVNFNFDDPNLIILPLAFGKRQGREFIWNDLLSLETGSLKLANGRVIEKTLYNRRTRQDEPALFVALTFERREVLDSSNIKPMNLIGVDRGENIPAVIALTDPEGCPLSRFKDSLGNPTHILRIGESYKEKQRTIQAKKEVEQRRAGGYSRKYASKAKNLADDMVRNTARDLLYYAVTQDAMLIFENLSRGFGRQGKRTFMAERQYTRMEDWLTAKLAYEGLPSKTYLSKTLAQYTSKTCSNCGFTITSADYDRVLEKLKKTATGWMTTINGKELKVEGQITYYNRYKRQNVVKDLSVELDRLSEESVNNDISSWTKGRSGEALSLLKKRFSHRPVQEKFVCLNCGFETHADEQAALNIARSWLFLRSQEYKKYQTNKTTGNTDKRAFVETWQSFYRKKLKEVWKPAV

SEQ ID NO: 146 - protein, 977 aa, Artificial Sequence
  CasX Variant
QEIKRINKIRRRLVKDSNTKKAGKTGPMKTLLVRVMTPDLRERLENLRKKPENIPQPISNTSRANLNKLLTDYTEMKKAILHVYWEEFQKDPVGLMSRVAQPASKKIDQNKLKPEMDEKGNLTTAGFACSQCGQPLFVYKLEQVSEKGKAYTNYFGRCNVAEHEKLILLAQLKPEKDSDEAVTYSLGKFGQRALDFYSIHVTKESTHPVKPLAQIAGNRYASGPVGKALSDACMGTIASFLSKYQDIIIEHQKVVKGNQKRLESLRELAGKENLEYPSVTLPPQPHTKEGVDAYNEVIARVRMWVNHNLWQKLKLSRDDAKPLLRLKGFPSFPLVERQANEVDWWDMVCNVKKLINEKKEDGKVFWQNLAGYKRQEALRPYLSSEEDRKKGKKFARYQLGDLLLHLEKKHGEDWGKVYDEAWERIDKKVEGLSKHIKLEEERRSEDAQSKAALTDWLRAKASFVIEGLKEADKDEFCRCELKLQKWYGDLRGKPFAIEAENSILDISGFSKQYNCAFIWQKDGVKKLNLYLIINYFKGGKLRFKKIKPEAFEANRFYTVINKKSGEIVPMEVNFNFDDPNLIILPLAFGKRQGREFIWNDLLSLETGSLKLANGRVIEKTLYNRRTRQDEPALFVALTFERREVLDSSNIKPMNLIGVDRGENIPAVIALTDPEGCPLSRFKDSLGNPTHILRIGESYKEKQRTIQAKKEVEQRRAGGYSRKYASKAKNLADDMVRNTARDLLYYAVTQDAMLIFENLSRGFGRQGKRTFMAERQYTRMEDWLTAKLAYEGLSKTYLSKTLAQYTSKTCSNCGFTITSADYDRVLEKLKKTATGWMTTINGKELKVEGQITYYNRYKRQNVVKDLSVELDRLSEESVNNDISSWTKGRSGEALSLLKKRFSHRPVQEKFVCLNCGFETHADEQAALNIARSWLFLRSQEYKKYQTNKTTGNTDKRAFVETWQSFYRKKLKEVWKPAV

SEQ ID NO: 147 - protein, 978 aa, Artificial Sequence
  CasX Variant
QEIKRINKIRRRLVKDSNTKKAGKTGPMKTLLVRVMTPDLRERLENLRKKPENIPQPISNTSRANLNKLLTDYTEMKKAILHVYWEEFQKDPVGLMSRVAQPASKKIDQNKLKPEMDEKGNLTTAGFACSQCGQPLFVYKLEQVSEKGKAYTNYFGRCNVAEHEKLILLAQLKPEKDSDEAVTYSLGKFGQRALDFYSIHVTKESTHPVKPLAQIAGNRYASGAPVGKALSDACMGTIASFLSKYQDIIIEHQKVVKGNQKRLESLRELAGKENLEYPSVTLPPQPHTKEGVDAYNEVIARVRMWVNLNLWQKLKLSRDDAKPLLRLKGFPSFPLVERQANEVDWWDMVCNVKKLINEKKEDGKVFWQNLAGYKRQEALRPYLSSEEDRKKGKKFARYQLGDLLLHLEKKHGEDWGKVYDEAWERIDKKVEGLSKHIKLEEERRSEDAQSKAALTDWLRAKASFVIEGLKEADKDEFCRCELKLQKWYGDLRGKPFAIEAENSILDISGFSKQYNCAFIWQKDGVKKLNLYLIINYFKGGKLRFKKIKPEAFEANRFYTVINKKSGEIVPMEVNFNFDDPNLIILPLAFGKRQGREFIWNDLLSLETGSLKLANGRVIEKTLYNRRTRQDEPALFVALTFERREVLDSSNIKPMNLIGVDRGENIPAVIALTDPEGCPLSRFKDSLGNPTHILRIGESYKEKQRTIQAKKEVEQRRAGGYSRKYASKAKNLADDMVRNTARDLLYYAVTQDAMLIFENLSRGFGRQGKRTFMAERQYTRMEDWLTAKLAYEGLSKTYLSKTLAQYTSKTCSNCGFTITSADYDRVLEKLKKTATGWMTTINGKELKVEGQITYYNRYKRQNVVKDLSVELDRLSEESVNNDISSWTKGRSGEALSLLKKRFSHRPVQEKFVCLNCGFETHADEQAALNIARSWLFLRSQEYKKYQTNKTTGNTDKRAFVETWQSFYRKKLKEVWKPAV

SEQ ID NO: 148 - protein, 979 aa, Artificial Sequence
  CasX Variant
RQEIKRINKIRRRLVKDSNTKKAGKTGPMKTLLVRVMTPDLRERLENLRKKPENIPQPISNTSRANLNKLLTDYTEMKKAILHVYWEEFQKDPVGLMSRVAQPASKKIDQNKLKPEMDEKGNLTTAGFACSQCGQPLFVYKLEQVSEKGKAYTNYFGRCNVAEHEKLILLAQLKPEKDSDEAVTYSLGKFGQRALDFYSIHVTKESTHPVKPLAQIAGNRYASGAPVGKALSDACMGTIASFLSKYQDIIIEHQKVVKGNQKRLESLRELAGKENLEYPSVTLPPQPHTKEGVDAYNEVIARVRMWVNLNLWQKLKLSRDDAKPLLRLKGFPSFPLVERQANEVDWWDMVCNVKKLINEKKEDGKVFWQNLAGYKRQEALRPYLSSEEDRKKGKKFARYQLGDLLLHLEKKHGEDWGKVYDEAWERIDKKVEGLSKHIKLEEERRSEDAQSKAALTDWLRAKASFVIEGLKEADKDEFCRCELKLQKWYGDLRGKPFAIEAENSILDISGFSKQYNCAFIWQKDGVKKLNLYLIINYFKGGKLRFKKIKPEAFEANRFYTVINKKSGEIVPMEVNFNFDDPNLIILPLAFGKRQGREFIWNDLLSLETGSLKLANGRVIEKTLYNRRTRQDEPALFVALTFERREVLDSSNIKPMNLIGVDRGENIPAVIALTDPEGCPLSRFKDSLGNPTHILRIGESYKEKQRTIQAKKEVEQRRAGGYSRKYASKAKNLADDMVRNTARDLLYYAVTQDAMLIFENLSRGFGRQGKRTFMAERQYTRMEDWLTAKLAYEGLSKTYLSKTLAQYTSKTCSNCGFTITSADYDRVLEKLKKTATGWMTTINGKELKVEGQITYYNRYKRQNVVKDLSVELDRLSEESVNNDISSWTKGRSGEALSLLKKRFSHRPVQEKFVCLNCGFETHADEQAALNIARSWLFLRSQEYKKYQTNKTTGNTDKRAFVETWQSFYRKKLKEVWKPAV

SEQ ID NO: 149 - protein, 978 aa, Artificial Sequence
  CasX Variant
QEIKRINKIRRRLVKDSNTKKAGKTGPMKTLLVRVMTPDLRERLENLRKKPENIPQPISNTSRANLNKLLTDYTEMKKAILHVYWEEFQKDPVGLMSRVAQPASKKIDQNKLKPEMDEKGNLTTAGFACSQCGQPLFVYKLEQVSEKGKAYTNYFGRCNVAEHEKLILLAQLKPEKDSDEAVTYSLGKFGQRALDFYSIHVTKESTHPVKPLAQIAGNRYASGPVGKALSDACMGTIASFLSKYQDIIIEHQKVVKGNQKRLESLRELAGKENLEYPSVTLPPQPHTKEGVDAYNEVIARVRMWVNLNLWQKLKLSRDDAKPLLRLKGFPSFPLVERQANEVDWWDMVCNVKKLINEKKEDGKVFWQNLAGYKRQEALRPYLSSEEDRKKGKKFARYQLGDLLLHLEKKHGEDWGKVYDEAWERIDKKVEGLSKHIKLEEERRSEDAQSKAALTDWLRAKASFVIEGLKEADKDEFCRCELKLQKWYGDLRGKPFAIEAENSILDISGFSKQYNCAFIWQKDGVKKLNLYLIINYFKGGKLRFKKIKPEAFEANRFYTVINKKSGEIVPMEVNFNFDDPNLIILPLAFGKRQGREFIWNDLLSLETGSLKLANGRVIEKTLYNRRTRQDEPALFVALTFERREVLDSSNIKPMNLIGVDRGENIPAVIALTDPEGCPLSRFKDSLGNPTHIQLRIGESYKEKQRTIQAKKEVEQRRAGGYSRKYASKAKNLADDMVRNTARDLLYYAVTQDAMLIFENLSRGFGRQGKRTFMAERQYTRMEDWLTAKLAYEGLSKTYLSKTLAQYTSKTCSNCGFTITSADYDRVLEKLKKTATGWMTTINGKELKVEGQITYYNRYKRQNVVKDLSVELDRLSEESVNNDISSWTKGRSGEALSLLKKRFSHRPVQEKFVCLNCGFETHADEQAALNIARSWLFLRSQEYKKYQTNKTTGNTDKRAFVETWQSFYRKKLKEVWKPAV

SEQ ID NO: 150 - protein, 977 aa, Artificial Sequence
  CasX Variant
QEIKRINKIRRRLVKDSNTKKAGKTGPMKTLLVRVMTPDLRERLENLRKKPENIPQPISNTSRANLNKLLTDYTEMKKAILHVYWEEFQKDPVGLMSRVAQPASKKIDQNKLKPEMDEKGNLTTAGFACSQCGQPLFVYKLEQVSEKGKAYTNYFGRCNVAEHEKLILLAQLKPEKDSDEAVTYSLGKFGQRALDFYSIHVTKESTHPVKPLAQIAGNRYASGPVGKALSDACMGTIASFLSKYQDIIIEHQKVVKGNQKRLESLRELAGKENLEYPSVTLPPQPHTKEGVDAYNEVIARVRMWVNLNLWQKLKLSRDDAKPLLRLKGFPSFPLVERQANEVDWWDMVCNVKKLINEKKEDGKVFWQNLAGYKRQEALRPYLSSEEDRKKGKKFARYQLGDLLLHLEKKHGEDWGKVYDEAWERIDKKVEGLSKHIKLEEERRSEDAQSKAALTDWLRAKASFVIEGLKEADKDEFCRCELKLQKWYGDLRGKPFAIEAENSILDISGFSKQYNCAFIWQKDGVKKLNLYLIINYFKGGKLRFKKIKPEAFEANRFYTVINKKSGEIVPMEVNFNFDDPNLIILPLAFGKRQGREFIWNDLLSLETGSLKLANGRVIEKTLYNRRTRQDEPALFVALTFERREVLDSSNIKPMNLIGVDRGENIPAVIALTDPEGCPLSRFKDSLGNPTHILRIGESYKEKQRTTQAKKEVEQRRAGGYSRKYASKAKNLADDMVRNTARDLLYYAVTQDAMLIFENLSRGFGRQGKRTFMAERQYTRMEDWLTAKLAYEGLSKTYLSKTLAQYTSKTCSNCGFTITSADYDRVLEKLKKTATGWMTTINGKELKVEGQITYYNRYKRQNVVKDLSVELDRLSEESVNNDISSWTKGRSGEALSLLKKRFSHRPVQEKFVCLNCGFETHADEQAALNIARSWLFLRSQEYKKYQTNKTTGNTDKRAFVETWQSFYRKKLKEVWKPAV

SEQ ID NO: 151 - protein, 977 aa, Artificial Sequence
  CasX Variant
QEIKRINKIRRRLVKDSNTKKAGKTGPMKTLLVRVMTPDLRERLENLRKKPENIPQPISNTSRANLNKLLTDYTEMKKAILHVYWEEFQKDPVGLMSRVAQPASKKIDQNKLKPEMDEKGNLTTAGFACSQCGQPLFVYKLEQVSEKGKAYTNYFGRCNVAEHEKLILLAQLKPEKDSDEAVTYSLGKFGQRALDFYSIHVTKESTHPVKPLAQIAGNRYASGPVGKALSDACMGTIASFLSKYQDIIIEHQKVVKGNQKRLESLRELAGKENLEYPSVTLPPQPHTKEGVDAYNEVIARVRMWVNLNLWQKLKLSRDDAKPLLRLKGFPSFPLVERQANEVDWWDMVCNVKKLINEKKEDGKVFWQNLAGYKRQEALRPYLSSEEDRKKGKKFARYQLGDLLLHLEKKHGEDWGKVYDEAWERIDKKVEGLSKHIKLEEERRSEDAQSKAALTDWLRAKASFVIEGLKEADKDEFCRCELKLQKWYGDLRGKPFAIEAENSILDISGFSKQYNCAFIWQKDGVKKLNLYLIINYFKGGKLRFKKIKPEAFEANRFYTVINKKSGEIVPMEVNFNFDDPNLIILPLAFGKRQGREFIWNDLLSLETGSLKLANGRVIEKTLYNRRTRQDEPALFVALTFERREVLDSSNIKPMNLIGVDRGENIPAVIALTDPEGCPLSRFKRSLGNPTHILRIGESYKEKQRTIQAKKEVEQRRAGGYSRKYASKAKNLADDMVRNTARDLLYYAVTQDAMLIFENLSRGFGRQGKRTFMAERQYTRMEDWLTAKLAYEGLSKTYLSKTLAQYTSKTCSNCGFTITSADYDRVLEKLKKTATGWMTTINGKELKVEGQITYYNRYKRQNVVKDLSVELDRLSEESVNNDISSWTKGRSGEALSLLKKRFSHRPVQEKFVCLNCGFETHADEQAALNIARSWLFLRSQEYKKYQTNKTTGNTDKRAFVETWQSFYRKKLKEVWKPAV

SEQ ID NO: 152 - protein, 977 aa, Artificial Sequence
  CasX Variant
QEIKRINKIRRRLVKDSNTKKAGKTYPMKTLLVRVMTPDLRERLENLRKKPENIPQPISNTSRANLNKLLTDYTEMKKAILHVYWEEFQKDPVGLMSRVAQPASKKIDQNKLKPEMDEKGNLTTAGFACSQCGQPLFVYKLEQVSEKGKAYTNYFGRCNVAEHEKLILLAQLKPEKDSDEAVTYSLGKFGQRALDFYSIHVTKESTHPVKPLAQIAGNRYASGPVGKALSDACMGTIASFLSKYQDIIIEHQKVVKGNQKRLESLRELAGKENLEYPSVTLPPQPHTKEGVDAYNEVIARVRMWVNLNLWQKLKLSRDDAKPLLRLKGFPSFPLVERQANEVDWWDMVCNVKKLINEKKEDGKVFWQNLAGYKRQEALRPYLSSEEDRKKGKKFARYQLGDLLLHLEKKHGEDWGKVYDEAWERIDKKVEGLSKHIKLEEERRSEDAQSKAALTDWLRAKASFVIEGLKEADKDEFCRCELKLQKWYGDLRGKPFAIEAENSILDISGFSKQYNCAFIWQKDGVKKLNLYLIINYFKGGKLRFKKIKPEAFEANRFYTVINKKSGEIVPMEVNFNFDDPNLIILPLAFGKRQGREFIWNDLLSLETGSLKLANGRVIEKTLYNRRTRQDEPALFVALTFERREVLDSSNIKPMNLIGVDRGENIPAVIALTDPEGCPLSRFKDSLGNPTHILRIGESYKEKQRTIQAKKEVEQRRAGGYSRKYASKAKNLADDMVRNTARDLLYYAVTQDAMLIFENLSRGFGRQGKRTFMAERQYTRMEDWLTAKLAYEGLSKTYLSKTLAQYTSKTCSNCGFTITSADYDRVLEKLKKTATGWMTTINGKELKVEGQITYYNRYKRQNVVKDLSVELDRLSEESVNNDISSWTKGRSGEALSLLKKRFSHRPVQEKFVCLNCGFETHADEQAALNIARSWLFLRSQEYKKYQTNKTTGNTDKRAFVETWQSFYRKKLKEVWKPAV

SEQ ID NO: 153 - protein, 977 aa, Artificial Sequence
  CasX Variant
QEIKRINKIRRRLVKDSNTKKAGKTGPMKTLLVRVMTPDLRERLENLRKKPENIPQPISNTSRANLNKLLTDYTEMKKAILHVYWEEFQKDPVGLMSRVAQPASKKIDQNKLKPEMDEKGNLTTAGFACSQCGQPLFVYKLEQVSEKGKAYTNYFGRCNVAEHEKLILLAQLKPEKDSDEAVTYSLGKFGQRALDFYSIHVTKESTHPVKPLAQIAGNRYASGPVGKALSDACMGTIASFLSKYQDIIIEHQKVVKGNQKRLESLRELAGKENLEYPSVTLPPQPHTKEGVDAYNEVIARVRMWVNLNLWQKLKLSRDDAKPLLRLKGFPSFPLVERQANEVDWWDMVCNVKKLINEKKEDGKVFWQNLAGYKRQEALRPYLSSEEDRKKGKKFARYQLGDLLLHLEKKHGEDWGKVYDEAWERIDKKVEGLSKHIKLEEERRSEDAQSKAALTDWLRAKASFVIEGLKEADKDEFCRCELKLQKWYGDLRGKPFAIEAENSILDISGFSKQYNCAFIWQKDGVKKLNLYLIINYFKGGKLRFKKIKPEAFEANRFYTVINKKSGEIVPMEVNFNFDDPNLIILPLAFGKRQGREFIWNDLLSLETGSLKLANGRVIEKTLYNRRTRQDEPALFVALTFERREVLDSSNIKPMNLIGVDRGENIPAVIALTDPEGCPLSRFKDSLGNPTHILRIGESYKEKQRTIQAKKEVEQRRAGGYSRKYASKAKNLADDMVRNTARDLLYYAVTQDAMLIFENLSRGFGRQGKRTFMAERQYTRMEDWLTAKLAYEGLSKTYLSKTLAQYTSKTCSNCGFTIHSADYDRVLEKLKKTATGWMTTINGKELKVEGQITYYNRYKRQNVVKDLSVELDRLSEESVNNDISSWTKGRSGEALSLLKKRFSHRPVQEKFVCLNCGFETHADEQAALNIARSWLFLRSQEYKKYQTNKTTGNTDKRAFVETWQSFYRKKLKEVWKPAV

SEQ ID NO: 154 - protein, 977 aa, Artificial Sequence
  CasX Variant
QEIKRINKIRRRLVKDSNTKKAGKTGPMKTLLVRVMTPDLRERLENLRKKPENIPQPISNTSRANLNKLLTDYTEMKKAILHVYWEEFQKDPVGLMSRVAQPASKKIDQNKLKPEMDEKGNLTTAGFACSQCGQPLFVYKLEQVSEKGKAYTNYFGRCNVAEHEKLILLAQLKPEKDSDEAVTYSLGKFGQRALDFYSIHVTKESTHPVKPLAQIAGNRYASGPVGKALSDACMGTIASFLSKYQDIIIEHQKVVKGNQKRLESLRELAGKENLEYPSVTLPPQPHTKEGVDAYNEVIARVRMWVNLNLWQKLKLSRDDAKPLLRLKGFPSFPLVERQANEVDWWDMVCNVKKLINEKKEDGKVFWQNLAGYKRQEALRPYLSSEEDRKKGKKFARYQLGDLLLHLEKKHGEDWGKVYDEAWERIDKKVEGLSKHIKLEEERRSEDAQSKAALTDWLRAKASFVIEGLKEADKDEFCRCELKLQKWYGDLRGKPFAIEAENSILDISGFSKQYNCAFIWQKDGVKKLNLYLIINYFKGGKLRFKKIKPEAFEANRFYTVINKKSGEIVPMEVNFNFDDPNLIILPLAFGKRQGREFIWNDLLSLETGSLKLANGRVIEKTLYNRRTRQDEPALFVALTFERREVLDSSNIKPMNLIGVDRGENIPAVIALTDPEGCPLSRFKDSLGNPTHILRIGESYKEKQRTIQAKKEVEQRRAGGYSRKYASKAKNLADDMVRNTARDLLYYAATQDAMLIFENLSRGFGRQGKRTFMAERQYTRMEDWLTAKLAYEGLSKTYLSKTLAQYTSKTCSNCGFTITSADYDRVLEKLKKTATGWMTTINGKELKVEGQITYYNRYKRQNVVKDLSVELDRLSEESVNNDISSWTKGRSGEALSLLKKRFSHRPVQEKFVCLNCGFETHADEQAALNIARSWLFLRSQEYKKYQTNKTTGNTDKRAFVETWQSFYRKKLKEVWKPAV

SEQ ID NO: 155 - protein, 977 aa, Artificial Sequence
  CasX Variant
QEIKRINKIRRRLVKDSNTKKAGKTGPMKTLLVRVMTPDLRERLENLRKKPENIPQPISNTSRANLNKLLTDYTEMKKAILHVYWEEFQKDPVGLMSRVAQPASKKIDQNKLKPEMDEKGNLTTAGFACSQCGQPLFVYKLEQVSEKGKAYTNYFGRCNVAEHEKLILLAQLKPEKDSDEAVTYSLGKFGQRALDFYSIHVTKESTHPVKPLAQIAGNRYASGPVGKALSDACMGTIASFLSKYQDIIIEHQKVVKGNQKRLESLRELAGKENLEYPSVTLPPQPHTKEGVDAYNEVIARVRMWVNLNLWQKLKLSRDDAKPLLRLKGFPSFPLVERQANEVDWWDMVCNVKKLINEKKEDGKVFWQNLAGYKRQEALRPYLSSEEDRKKGKKFARYQLGDLLLHLEKKHGEDWGKVYDEAWERIDKKVEGLSKHIKLEEERRSEDAQSKAALTDWLRAKASFVIEGLKEADKDEFCRCELKLQKWYGDLRGKPFAIEAENSILDISGFSKQYNCAFIWQKDGVKKLNLYLIINYFKGGKLRFKKIKPEAFEANRFYTVINKKSGEIVPMEVNFNFDDPNLIILPLAFGKRQGREFIWNDLLSLETGSLKLANGRVIEKTLYNRRTRQDEPALFVALTFERREVLDSSNIKPMNLIGVDRGENIPAVIALTDPEGCPLSRFKDSLGNPTHILRIGESYKEKQRTIQAAKEVEQRRAGGYSRKYASKAKNLADDMVRNTARDLLYYAVTQDAMLIFENLSRGFGRQGKRTFMAERQYTRMEDWLTAKLAYEGLSKTYLSKTLAQYTSKTCSNCGFTITSADYDRVLEKLKKTATGWMTTINGKELKVEGQITYYNRYKRQNVVKDLSVELDRLSEESVNNDISSWTKGRSGEALSLLKKRFSHRPVQEKFVCLNCGFETHADEQAALNIARSWLFLRSQEYKKYQTNKTTGNTDKRAFVETWQSFYRKKLKEVWKPAV

SEQ ID NO: 156 - protein, 978 aa, Artificial Sequence
  CasX Variant
QEIKRINKIRRRLVKDSNTKKAGKTRGPMKTLLVRVMTPDLRERLENLRKKPENIPQPISNTSRANLNKLLTDYTEMKKAILHVYWEEFQKDPVGLMSRVAQPASKKIDQNKLKPEMDEKGNLTTAGFACSQCGQPLFVYKLEQVSEKGKAYTNYFGRCNVAEHEKLILLAQLKPEKDSDEAVTYSLGKFGQRALDFYSIHVTKESTHPVKPLAQIAGNRYASGPVGKALSDACMGTIASFLSKYQDIIIEHQKVVKGNQKRLESLRELAGKENLEYPSVTLPPQPHTKEGVDAYNEVIARVRMWVNLNLWQKLKLSRDDAKPLLRLKGFPSFPLVERQANEVDWWDMVCNVKKLINEKKEDGKVFWQNLAGYKRQEALRPYLSSEEDRKKGKKFARYQLGDLLLHLEKKHGEDWGKVYDEAWERIDKKVEGLSKHIKLEEERRSEDAQSKAALTDWLRAKASFVIEGLKEADKDEFCRCELKLQKWYGDLRGKPFAIEAENSILDISGFSKQYNCAFIWQKDGVKKLNLYLIINYFKGGKLRFKKIKPEAFEANRFYTVINKKSGEIVPMEVNFNFDDPNLIILPLAFGKRQGREFIWNDLLSLETGSLKLANGRVIEKTLYNRRTRQDEPALFVALTFERREVLDSSNIKPMNLIGVDRGENIPAVIALTDPEGCPLSRFKDSLGNPTHILRIGESYKEKQRTIQAKKEVEQRRAGGYSRKYASKAKNLADDMVRNTARDLLYYAVTQDAMLIFENLSRGFGRQGKRTFMAERQYTRMEDWLTAKLAYEGLSKTYLSKTLAQYTSKTCSNCGFTITSADYDRVLEKLKKTATGWMTTINGKELKVEGQITYYNRYKRQNVVKDLSVELDRLSEESVNNDISSWTKGRSGEALSLLKKRFSHRPVQEKFVCLNCGFETHADEQAALNIARSWLFLRSQEYKKYQTNKTTGNTDKRAFVETWQSFYRKKLKEVWKPAV

SEQ ID NO: 157 - protein, 978 aa, Artificial Sequence
  CasX Variant
QEIKRINKIRRRLVKDSNTKKAGKTGPMKTLLVRVMTPDLRERLENLRKKPENIPQPISNTSRANLNKLLTDYTEMKKAILHVYWEEFQKDPVGLMSRVAQPASKKIDQNKLKPEMDEKGNLTTAGFACSQCGQPLFVYKLEQVSEKGKAYTNYFGRCNVAEHEKLILLAQLKPEKDSDEAVTYSLGKFGQRALDFYSIHVTKESTHPVKPLAQIAGNRYASYPVGKALSDACMGTIASFLSKYQDIIIEHQKVVKGNQKRLESLRELAGKENLEYPSVTLPPQPHTKEGVDAYNEVIARVRMWVNLNLWQKLKLSRDDAKPLLRLKGFPSFPLVERQANEVDWWDMVCNVKKLINEKKEDGKVFWQNLAGYKRQEALRPYLSSEEDRKKGKKFARYQLGDLLLHLEKKHGEDWGKVYDEAWERIDKKVEGLSKHIKLEEERRSEDAQSKAALTDWLRAKASFVIEGLKEADKDEFCRCELKLQKWYGDLRGKPFAIEAENSILDISGFSKQYNCAFIWQKDGVKKLNLYLIINYFKGGKLRFKKIKPEAFEANRFYTVINKKSGEIVPMEVNFNFDDPNLIILPLAFGKRQGREFIWNDLLSLETGSLKLANGRVIEKTLYNRRTRQDEPALFVALTFERREVLDSSNIKPMNLIGVDRGENIPAVIALTDPEGCPLSRFKDSLGNPTHILRIGESYKEKQRTIQAKKEVEQRRAGGYSRKYASKAKNLADDMVRNTARDLLYYAVTQDAMLIFENLSRGFGRQGKRTFMAERQYTRMEDWLTAKLAYEGLPSKTYLSKTLAQYTSKTCSNCGFTITSADYDRVLEKLKKTATGWMTTINGKELKVEGQITYYNRYKRQNVVKDLSVELDRLSEESVNNDISSWTKGRSGEALSLLKKRFSHRPVQEKFVCLNCGFETHADEQAALNIARSWLFLRSQEYKKYQTNKTTGNTDKRAFVETWQSFYRKKLKEVWKPAV

SEQ ID NO: 158 - protein, 978 aa, Artificial Sequence
  CasX Variant
QEIKRINKIRRRLVKDSNTKKAGKTGPMKTLLVRVMTPDLRERLENLRKKPENIPQPISNTSRANLNKLLTDYTEMKKAILHVYWEEFQKDPVGLMSRVAQPASKKIDQNKLKPEMDEKGNLTTAGFACSQCGQPLFVYKLEQVSEKGKAYTNYFGRCNVAEHEKLILLAQLKPEKDSDEAVTYSLGKFGQRALDFYSIHVTKESTHPVKPLAQIAGNRYASNPVGKALSDACMGTIASFLSKYQDIIIEHQKVVKGNQKRLESLRELAGKENLEYPSVTLPPQPHTKEGVDAYNEVIARVRMWVNLNLWQKLKLSRDDAKPLLRLKGFPSFPLVERQANEVDWWDMVCNVKKLINEKKEDGKVFWQNLAGYKRQEALRPYLSSEEDRKKGKKFARYQLGDLLLHLEKKHGEDWGKVYDEAWERIDKKVEGLSKHIKLEEERRSEDAQSKAALTDWLRAKASFVIEGLKEADKDEFCRCELKLQKWYGDLRGKPFAIEAENSILDISGFSKQYNCAFIWQKDGVKKLNLYLIINYFKGGKLRFKKIKPEAFEANRFYTVINKKSGEIVPMEVNFNFDDPNLIILPLAFGKRQGREFIWNDLLSLETGSLKLANGRVIEKTLYNRRTRQDEPALFVALTFERREVLDSSNIKPMNLIGVDRGENIPAVIALTDPEGCPLSRFKDSLGNPTHILRIGESYKEKQRTIQAKKEVEQRRAGGYSRKYASKAKNLADDMVRNTARDLLYYAVTQDAMLIFENLSRGFGRQGKRTFMAERQYTRMEDWLTAKLAYEGLPSKTYLSKTLAQYTSKTCSNCGFTITSADYDRVLEKLKKTATGWMTTINGKELKVEGQITYYNRYKRQNVVKDLSVELDRLSEESVNNDISSWTKGRSGEALSLLKKRFSHRPVQEKFVCLNCGFETHADEQAALNIARSWLFLRSQEYKKYQTNKTTGNTDKRAFVETWQSFYRKKLKEVWKPAV

SEQ ID NO: 159 - protein, 979 aa, Artificial Sequence
  CasX Variant
QEIKRINKIRRRLVKDSNTKKAGKTGPMKTLLVRVMTPDLRERLENLRKKPENIPQPISNTSRANLNKLLTDYTEMKKAILHVYWEEFQKDPVGLMSRVAQPASKKIDQNKLKPEMDEKGNLTTAGFACSQCGQPLFVYKLEQVSEKGKAYTNYFGRCNVAEHEKLILLAQLKPEKDSDEAVTYSLGKFGQRALDFYSIHVTKESTHPVKPLAQIAGNRYASGPVGKALSDACMGTIASFLSKYQDIIIEHQKVVKGNQKRLESLRELAGKENLEYPSVTLPPQPHTKEGVDAYNEVIARVRMWVNLNLWQKLKLSRDDAKPLLRLKGFPSFPLVERQANEVDWWDMVCNVKKLINEKKEDGKVFWQNLAGYKRQEALRPYLSSEEDRKKGKKFARYQLGDLLLHLEKKHGEDWGKVYDEAWERIDKKVEGLSKHIKLEEERRSEDAQSKAALTDWLRAKASFVIEGLKEADKDEFCRCELKLQKWYGDLRGKPFAIEAENSILDISGFSKQYNCAFIWQKDGVKKLNLYLIINYFKGWGKLRFKKIKPEAFEANRFYTVINKKSGEIVPMEVNFNFDDPNLIILPLAFGKRQGREFIWNDLLSLETGSLKLANGRVIEKTLYNRRTRQDEPALFVALTFERREVLDSSNIKPMNLIGVDRGENIPAVIALTDPEGCPLSRFKDSLGNPTHILRIGESYKEKQRTIQAKKEVEQRRAGGYSRKYASKAKNLADDMVRNTARDLLYYAVTQDAMLIFENLSRGFGRQGKRTFMAERQYTRMEDWLTAKLAYEGLPSKTYLSKTLAQYTSKTCSNCGFTITSADYDRVLEKLKKTATGWMTTINGKELKVEGQITYYNRYKRQNVVKDLSVELDRLSEESVNNDISSWTKGRSGEALSLLKKRFSHRPVQEKFVCLNCGFETHADEQAALNIARSWLFLRSQEYKKYQTNKTTGNTDKRAFVETWQSFYRKKLKEVWKPAV

SEQ ID NO: 160 - protein, 979 aa, Artificial Sequence
  CasX Variant
QEIKRINKIRRRLVKDSNTKKAGKTGPMKTLLVRVMTPDLRERLENLRKKPENIPQPISNTSRANLNKLLTDYTEMKKAILHVYWEEFQKDPVGLMSRVAQPASKKIDQNKLKPEMDEKGNLTTAGFACSQCGQPLFVYKLEQVSEKGKAYTNYFGRCNVAEHEKLILLAQLKPEKDSDEAVTYSLGKFGQRALDFYSIHVTKESTHPVKPLAQIAGNRYASGPVGKALSDACMGTIASFLSKYQDIIIEHQKVVKGNQKRLESLRELAGKENLEYPSVTLPPQPHTKEGVDAYNEVIARVRMWVNLNLWQKLKLSRDDAKPLLRLKGFPSFPLVERQANEVDWWDMVCNVKKLINEKKEDGKVFWQNLAGYKRQEALRPYLSSEEDRKKGKKFARYQLGDLLLHLEKKHGEDWGKVYDEAWERIDKKVEGLSKHIKLEEERRSEDAQSKAALTDWLRAKASFVIEGLKEADKDEFCRCELKLQKWYGDLRGKPFAIEAENSILDISGFSKQYNCAFIWQKDGVKKLNLYLIINYFKGYGKLRFKKIKPEAFEANRFYTVINKKSGEIVPMEVNFNFDDPNLIILPLAFGKRQGREFIWNDLLSLETGSLKLANGRVIEKTLYNRRTRQDEPALFVALTFERREVLDSSNIKPMNLIGVDRGENIPAVIALTDPEGCPLSRFKDSLGNPTHILRIGESYKEKQRTIQAKKEVEQRRAGGYSRKYASKAKNLADDMVRNTARDLLYYAVTQDAMLIFENLSRGFGRQGKRTFMAERQYTRMEDWLTAKLAYEGLPSKTYLSKTLAQYTSKTCSNCGFTITSADYDRVLEKLKKTATGWMTTINGKELKVEGQITYYNRYKRQNVVKDLSVELDRLSEESVNNDISSWTKGRSGEALSLLKKRFSHRPVQEKFVCLNCGFETHADEQAALNIARSWLFLRSQEYKKYQTNKTTGNTDKRAFVETWQSFYRKKLKEVWKPAV

SEQ ID NO: 161 - protein, 11 aa, Homo sapiens
RQRRNELKRSP

SEQ ID NO: 162 - protein, 38 aa, Unknown
  nuclear localization signal
NQSSNFGPMKGGNFGGRSSGPYGGGGQYFAKPRNQGGY

SEQ ID NO: 163 - protein, 42 aa, Unknown
  nuclear localization signal
RMRIZFKNKGKDTAELRRRRVEVSVELRKAKKDEQILKRRNV

SEQ ID NO: 164 - protein, 8 aa, Unknown
  nuclear localization signal
VSRKRPRP

SEQ ID NO: 165 - protein, 8 aa, Unknown
  nuclear localization signal
PPKKARED

SEQ ID NO: 166 - protein, 8 aa, Homo sapiens
PQPKKKPL

SEQ ID NO: 167 - protein, 12 aa, Mus musculus
SALIKKKKKMAP

SEQ ID NO: 168 - protein, 5 aa, Alphainfluenzavirus influenza A virus
DRLRR

SEQ ID NO: 169 - protein, 7 aa, Alphainfluenzavirus influenza A virus
PKQKKRK

SEQ ID NO: 170 - protein, 10 aa, Deltavirus hepatitis delta virus
RKLKKKIKKL

SEQ ID NO: 171 - protein, 10 aa, Mus musculus
REKKKFLKRR

SEQ ID NO: 172 - protein, 20 aa, Homo sapiens
KRKGDEVDGVDEVAKKKSKK

SEQ ID NO: 173 - protein, 17 aa, Homo sapiens
RKCLQAGMNLEARKTKK

SEQ ID NO: 174 - protein, 8 aa, Orthobornavirus mammalian 1 orthobornavirus
PRPRKIPR

SEQ ID NO: 175 - protein, 9 aa, Hepacivirus hepacivirus C
PPRKKRTVV

SEQ ID NO: 176 - protein, 12 aa, Unknown
  nuclear localization signal
NLSKKKKRKREK

SEQ ID NO: 177 - protein, 10 aa, Unknown
  nuclear localization signal
RRPSRPFRKP

SEQ ID NO: 178 - protein, 8 aa, Lymphocryptovirus human gammaherpesvirus 4
KRPRSPSS

SEQ ID NO: 179 - protein, 19 aa, Alphainfluenzavirus influenza A virus
KRGINDRNFWRGENERKTR

SEQ ID NO: 180 - protein, 11 aa, Homo sapiens
PRPPKMARYDN

SEQ ID NO: 181 - protein, 8 aa, Unknown
  nuclear localization signal
KRSFSKAF

SEQ ID NO: 182 - protein, 9 aa, Unknown
  nuclear localization signal
KLKIKRPVK

SEQ ID NO: 183 - protein, 19 aa, Unknown
  nuclear localization signal
PKKKRKVPPPPAAKRVKLD

SEQ ID NO: 184 - protein, 17 aa, Deltaretrovirus human T-lymphotropic virus 1
PKTRRRPRRSQRKRPPT

SEQ ID NO: 185 - protein, 25 aa, Caenorhabditis elegans
MSRRRKANPTKLSENAKKLAKEVEN

SEQ ID NO: 186 - protein, 16 aa, Unknown
  nuclear localization signal
KTRRRPRRSQRKRPPT

SEQ ID NO: 187 - protein, 13 aa, Unknown
  nuclear localization signal
RRKKRRPRRKKRR

SEQ ID NO: 188 - protein, 14 aa, Unknown
  nuclear localization signal
PKKKSRKPKKKSRK

SEQ ID NO: 189 - protein, 17 aa, Unknown
  nuclear localization signal
HKKKHPDASVNFSEFSK

SEQ ID NO: 190 - protein, 18 aa, Unknown
  nuclear localization signal
QRPGPYDRPQRPGPYDRP

SEQ ID NO: 191 - protein, 16 aa, Unknown
  nuclear localization signal
LSPSLSPLLSPSLSPL

SEQ ID NO: 192 - protein, 18 aa, Unknown
  nuclear localization signal
RGKGGKGLGKGGAKRHRK

SEQ ID NO: 193 - protein, 14 aa, Unknown
  nuclear localization signal
PKRGRGRPKRGRGR

SEQ ID NO: 194 - protein, 17 aa, Unknown
  nuclear localization signal
PKKKRKVPPPPKKKRKV

SEQ ID NO: 195 - protein, 11 aa, Human immunodeficiency virus 1
YGRKKRRQRRR

SEQ ID NO: 196 - protein, 8 aa, Human immunodeficiency virus 1
RKKRRQRR

SEQ ID NO: 197 - protein, 11 aa, Human immunodeficiency virus 1
YARAAARQARA

SEQ ID NO: 198 - protein, 11 aa, Human immunodeficiency virus 1
THRLPRRRRRR

SEQ ID NO: 199 - protein, 11 aa, Human immunodeficiency virus 1
GGRRARRRRRR

SEQ ID NO: 200 - protein, 50 aa, Artificial Sequence
  peptide transduction domain
  MISC_FEATURE (4)..(50): These individual amino acid residues may be present or absent
RRRRRRRRRRRRRRRRRRRRRRRRRRRRRRRRRRRRRRRRRRRRRRRRRR

SEQ ID NO: 201 - protein, 12 aa, Artificial Sequence
  peptide transduction domain
RRQRRTSKLMKR

SEQ ID NO: 202 - protein, 27 aa, Artificial Sequence
  peptide transduction domain
GWTLNSAGYLLGKINLKALAALAKKIL

SEQ ID NO: 203 - protein, 33 aa, Artificial Sequence
  peptide transduction domain
KALAWEAKLAKALAKALAKHLAKALAKALKCEA

SEQ ID NO: 204 - protein, 16 aa, Artificial Sequence
  peptide transduction domain
RQIKIWFQNRRMKWKK

SEQ ID NO: 205 - protein, 5 aa, Artificial Sequence
  linker polypeptide
GSGGS

SEQ ID NO: 206 - protein, 6 aa, Artificial Sequence
  linker polypeptide
GGSGGS

SEQ ID NO: 207 - protein, 4 aa, Artificial Sequence
  linker polypeptide
GGGS

SEQ ID NO: 208 - protein, 4 aa, Artificial Sequence
  linker polypeptide
GGSG

SEQ ID NO: 209 - protein, 5 aa, Artificial Sequence
  linker polypeptide
GGSGG

SEQ ID NO: 210 - protein, 5 aa, Artificial Sequence
  linker polypeptide
GSGSG

SEQ ID NO: 211 - protein, 5 aa, Artificial Sequence
  linker polypeptide
GSGGG

SEQ ID NO: 212 - protein, 5 aa, Artificial Sequence
  linker polypeptide
GGGSG

SEQ ID NO: 213 - protein, 5 aa, Artificial Sequence
  linker polypeptide
GSSSG

SEQ ID NO: 214 - protein, 4 aa, Artificial Sequence
  linker polypeptide
GPGP

SEQ ID NO: 215 - protein, 6 aa, Artificial Sequence
  linker polypeptide
PPAPPA

SEQ ID NO: 216 - protein, 7 aa, Artificial Sequence
  linker polypeptide
PPPGPPP

SEQ ID NO: 217 - protein, 7 aa, Unknown
  nuclear localization signal
PKKKRKV

SEQ ID NO: 218 - DNA, 47 bp, Artificial Sequence
  TTC protospacer adjacent motif
  misc_feature (1)..(2): n is a, c, g, or t
  misc_feature (6)..(47): n is a, c, g, or t
nnttcnnnnnnnnnnnnnnnnnnnnnnnnnnnnnnnnnnnnnnnnnn

SEQ ID NO: 219 - DNA, 47 bp, Artificial Sequence
  CTC protospacer adjacent motif
  misc_feature (1)..(2): n is a, c, g, or t
  misc_feature (6)..(47): n is a, c, g, or t
nnctcnnnnnnnnnnnnnnnnnnnnnnnnnnnnnnnnnnnnnnnnnn

SEQ ID NO: 220 - DNA, 47 bp, Artificial Sequence
  GTC protospacer adjacent motif
  misc_feature (1)..(2): n is a, c, g, or t
  misc_feature (6)..(47): n is a, c, g, or t
nngtcnnnnnnnnnnnnnnnnnnnnnnnnnnnnnnnnnnnnnnnnnn

SEQ ID NO: 221 - DNA, 47 bp, Artificial Sequence
  ATC protospacer adjacent motif
  misc_feature (1)..(2): n is a, c, g, or t
  misc_feature (6)..(47): n is a, c, g, or t
nnatcnnnnnnnnnnnnnnnnnnnnnnnnnnnnnnnnnnnnnnnnnn

SEQ ID NO: 222 - DNA, 47 bp, Artificial Sequence
  TC protospacer adjacent motif
  misc_feature (1)..(3): n is a, c, g, or t
  misc_feature (6)..(47): n is a, c, g, or t
nnntcnnnnnnnnnnnnnnnnnnnnnnnnnnnnnnnnnnnnnnnnnn

SEQ ID NO: 223 - protein, 16 aa, Unknown
  nuclear localization signal
KRPAATKKAGQAKKKK

SEQ ID NO: 224 - protein, 9 aa, Unknown
  nuclear localization signal
PAAKRVKLD

SEQ ID NO: 225 - DNA, 20 bp, Artificial Sequence
  mouse PCSK9 targeting sequence
gaggctagaggactgagcca

SEQ ID NO: 226 - RNA, 20 nt, Artificial Sequence
  mouse PCSK9 targeting sequence
gaggcuagaggacugagcca

SEQ ID NO: 227 - DNA, 4550 bp, Artificial Sequence
  AAV construct
cctgcaggcagctgcgcgctcgctcgctcactgaggccgcccgggcgtcgggcgacctttggtcgcccggcctcagtgagcgagcgagcgcgcagagagggagtggccaactccatcactaggggttcctgcggcctctagactcgaggcgttgacattgattattgactagttattaatagtaatcaattacggggtcattagttcatagcccatatatggagttccgcgttacataacttacggtaaatggcccgcctggctgaccgcccaacgacccccgcccattgacgtcaataatgacgtatgttcccatagtaacgccaatagggactttccattgacgtcaatgggtggagtatttacggtaaactgcccacttggcagtacatcaagtgtatcatatgccaagtacgccccctattgacgtcaatgacggtaaatggcccgcctggcattatgcccagtacatgaccttatgggactttcctacttggcagtacatctacgtattagtcatcgctattaccatggtgatgcggttttggcagtacatcaatgggcgtggatagcggtttgactcacggggatttccaagtctccaccccattgacgtcaatgggagtttgttttggcaccaaaatcaacgggactttccaaaatgtcgtaacaactccgccccattgacgcaaatgggcggtaggcgtgtacggtgggaggtctatataagcagagctctctggctaactaccggtgccaccatggccccaaagaagaagcggaaggtctctagacaagagatcaagagaatcaacaagatcagaaggagactggtcaaggacagcaacacaaagaaggccggcaagacaggccccatgaaaaccctgctcgtcagagtgatgacccctgacctgagagagcggctggaaaacctgagaaagaagcccgagaacatccctcagcctatcagcaacaccagcagggccaacctgaacaagctgctgaccgactacaccgagatgaagaaagccatcctgcacgtgtactgggaagagttccagaaagaccccgtgggcctgatgagcagagttgctcagcctgccagcaagaagatcgaccagaacaagctgaagcccgagatggacgagaagggcaatctgaccacagccggctttgcctgctctcagtgtggccagcctctgttcgtgtacaagctggaacaggtgtccgagaaaggcaaggcctacaccaactacttcggcagatgtaacgtggccgagcacgagaagctgattctgctggcccagctgaaacctgagaaggactctgatgaggccgtgacctacagcctgggcaagtttggacagagagccctggacttctacagcatccacgtgaccaaagaaagcacacaccccgtgaagcccctggctcagatcgccggcaatagatacgcctctggacctgtgggcaaagccctgtccgatgcctgcatgggaacaatcgccagcttcctgagcaagtaccaggacatcatcatcgagcaccagaaggtggtcaagggcaaccagaagagactggaaagcctgagggagctggccggcaaagagaacctggaataccccagcgtgaccctgcctcctcagcctcacacaaaagaaggcgtggacgcctacaacgaagtgatcgccagagtgagaatgtgggtcaacctgaacctgtggcagaagctgaaactgtccagggacgacgccaagcctctgctgagactgaagggcttccctagcttccctctggtggaaagacaggccaatgaagtggattggtgggacatggtctgcaacgtgaagaagctgatcaacgagaagaaagaggatggcaaggttttctggcagaacctggccggctacaagagacaagaagccctgaggccttacctgagcagcgaagaggaccggaagaagggcaagaagttcgccagataccagctgggcgacctgctgctgcacctggaaaagaagcacggcgaggactggggcaaagtgtacgatgaggcctgggagagaatcgacaagaaggtggaaggcctgagcaagcacattaagctggaagaggaaagaaggagcgaggacgcccaatctaaagccgctctgaccgattggctgagagccaaggccagctttgtgatcgagggcctgaaagaggccgacaaggacgagttctgcagatgcgagctgaagctgcagaagtggtacggcgatctgagaggcaagcccttcgccattgaggccgagaacagcatcctggacatcagcggcttcagcaagcagtacaactgcgccttcatttggcagaaagacggcgtcaagaaactgaacctgtacctgatcatcaattacttcaaaggcggcaagctgcggttcaagaagatcaaacccgaggccttcgaggctaacagattctacaccgtgatcaacaaaaagtccggcgagatcgtgcccatggaagtgaacttcaacttcgacgaccccaacctgattatcctgcctctggccttcggcaagagacagggcagagagttcatctggaacgatctgctgagcctggaaaccggctctctgaagctggccaatggcagagtgatcgagaaaaccctgtacaacaggagaaccagacaggacgagcctgctctgtttgtggccctgaccttcgagagaagagaggtgctggacagcagcaacatcaagcccatgaacctgatcggcgtggaccggggcgagaatatccctgctgtgatcgccctgacagaccctgaaggatgcccactgagcagattcaaggactccctgggcaaccctacacacatcctgagaatcggcgagagctacaaagagaagcagaggacaatccaggccaagaaagaggtggaacagcgcagagccggcggatactctaggaagtacgccagcaaggccaagaatctggccgacgacatggtccgaaacaccgccagagatctgctgtactacgccgtgacacaggacgccatgctgatcttcgagaatctgagcagaggcttcggccggcagggcaagagaacctttatggccgagaggcagtacaccagaatggaagattggctcacagctaaactggcctacgagggactgagcaagacctacctgtccaaaacactggcccagtatacctccaagacctgcagcaattgcggcttcaccatcaccagcgccgactacgacagagtgctggaaaagctcaagaaaaccgccaccggctggatgaccaccatcaacggcaaagagctgaaggttgagggccagatcacctactacaacaggtacaagaggcagaacgtcgtgaaggatctgagcgtggaactggacagactgagcgaagagagcgtgaacaacgacatcagcagctggacaaagggcagatcaggcgaggctctgagcctgctgaagaagaggtttagccacagacctgtgcaagagaagttcgtgtgcctgaactgcggcttcgagacacacgccgatgaacaggctgccctgaacattgccagaagctggctgttcctgagaagccaagagtacaagaagtaccagaccaacaagaccaccggcaacaccgacaagagggcctttgtggaaacctggcagagcttctacagaaaaaagctgaaagaagtctggaagcccgccgtgggatccccaaaaaagaagagaaaggtatacccatatgatgtccctgactacgctggatcctaagaattcctagagctcgctgatcagcctcgactgtgccttctagttgccagccatctgttgtttgcccctcccccgtgccttccttgaccctggaaggtgccactcccactgtcctttcctaataaaatgaggaaattgcatcgcattgtctgagtaggtgtcattctattctggggggtggggtggggcaggacagcaagggggaggattgggaagagaatagcaggcatgctggggaggtaccgtgagggcctatttcccatgattccttcatatttgcatatacgatacaaggctgttagagagataattggaattaatttgactgtaaacacaaagatattagtacaaaatacgtgacgtagaaagtaataatttcttgggtagtttgcagttttaaaattatgttttaaaatggactatcatatgcttaccgtaacttgaaagtatttcgatttcttggctttatatatcttgtggaaaggacgaaacaccactggcgcttttatctgattactttgagagccatcaccagcgactatgtcgtagtgggtaaagctccctcttcggagggagcatcaaaggaggctagaggactgagccattttttttggcggccgcaggaacccctagtgatggagttggccactccctctctgcgcgctcgctcgctcactgaggccgggcgaccaaaggtcgcccgacgcccgggctttgcccgggcggcctcagtgagcgagcgagcgcgcagctgcctgcagg

SEQ ID NO: 228 - DNA, 4965 bp, Artificial Sequence
  AAV construct
cctgcaggcagctgcgcgctcgctcgctcactgaggccgcccgggcgtcgggcgacctttggtcgcccggcctcagtgagcgagcgagcgcgcagagagggagtggccaactccatcactaggggttcctgcggcctctagactcgagggcctccgcgccgggttttggcgcctcccgcgggcgcccccctcctcacggcgagcgctgccacgtcagacgaagggcgcagcgagcgtcctgatccttccgcccggacgctcaggacagcggcccgctgctcataagactcggccttagaaccccagtatcagcagaaggacattttaggacgggacttgggtgactctagggcactggttttctttccagagagcggaacaggcgaggaaaagtagtcccttctcggcgattctgcggagggatctccgtggggcggtgaacgccgatgattatataaggacgcgccgggtgtggcacagctagttccgtcgcagccgggatttgggtcgcggttcttgtttgtggatcgctgtgatcgtcacttggtaccggtgccaccatggccccaaagaagaagcggaaggtctctagacaagagatcaagagaatcaacaagatcagaaggagactggtcaaggacagcaacacaaagaaggccggcaagacaggccccatgaaaaccctgctcgtcagagtgatgacccctgacctgagagagcggctggaaaacctgagaaagaagcccgagaacatccctcagcctatcagcaacaccagcagggccaacctgaacaagctgctgaccgactacaccgagatgaagaaagccatcctgcacgtgtactgggaagagttccagaaagaccccgtgggcctgatgagcagagttgctcagcctgccagcaagaagatcgaccagaacaagctgaagcccgagatggacgagaagggcaatctgaccacagccggctttgcctgctctcagtgtggccagcctctgttcgtgtacaagctggaacaggtgtccgagaaaggcaaggcctacaccaactacttcggcagatgtaacgtggccgagcacgagaagctgattctgctggcccagctgaaacctgagaaggactctgatgaggccgtgacctacagcctgggcaagtttggacagagagccctggacttctacagcatccacgtgaccaaagaaagcacacaccccgtgaagcccctggctcagatcgccggcaatagatacgcctctggacctgtgggcaaagccctgtccgatgcctgcatgggaacaatcgccagcttcctgagcaagtaccaggacatcatcatcgagcaccagaaggtggtcaagggcaaccagaagagactggaaagcctgagggagctggccggcaaagagaacctggaataccccagcgtgaccctgcctcctcagcctcacacaaaagaaggcgtggacgcctacaacgaagtgatcgccagagtgagaatgtgggtcaacctgaacctgtggcagaagctgaaactgtccagggacgacgccaagcctctgctgagactgaagggcttccctagcttccctctggtggaaagacaggccaatgaagtggattggtgggacatggtctgcaacgtgaagaagctgatcaacgagaagaaagaggatggcaaggttttctggcagaacctggccggctacaagagacaagaagccctgaggccttacctgagcagcgaagaggaccggaagaagggcaagaagttcgccagataccagctgggcgacctgctgctgcacctggaaaagaagcacggcgaggactggggcaaagtgtacgatgaggcctgggagagaatcgacaagaaggtggaaggcctgagcaagcacattaagctggaagaggaaagaaggagcgaggacgcccaatctaaagccgctctgaccgattggctgagagccaaggccagctttgtgatcgagggcctgaaagaggccgacaaggacgagttctgcagatgcgagctgaagctgcagaagtggtacggcgatctgagaggcaagcccttcgccattgaggccgagaacagcatcctggacatcagcggcttcagcaagcagtacaactgcgccttcatttggcagaaagacggcgtcaagaaactgaacctgtacctgatcatcaattacttcaaaggcggcaagctgcggttcaagaagatcaaacccgaggccttcgaggctaacagattctacaccgtgatcaacaaaaagtccggcgagatcgtgcccatggaagtgaacttcaacttcgacgaccccaacctgattatcctgcctctggccttcggcaagagacagggcagagagttcatctggaacgatctgctgagcctggaaaccggctctctgaagctggccaatggcagagtgatcgagaaaaccctgtacaacaggagaaccagacaggacgagcctgctctgtttgtggccctgaccttcgagagaagagaggtgctggacagcagcaacatcaagcccatgaacctgatcggcgtggaccggggcgagaatatccctgctgtgatcgccctgacagaccctgaaggatgcccactgagcagattcaaggactccctgggcaaccctacacacatcctgagaatcggcgagagctacaaagagaagcagaggacaatccaggccaagaaagaggtggaacagcgcagagccggcggatactctaggaagtacgccagcaaggccaagaatctggccgacgacatggtccgaaacaccgccagagatctgctgtactacgccgtgacacaggacgccatgctgatcttcgagaatctgagcagaggcttcggccggcagggcaagagaacctttatggccgagaggcagtacaccagaatggaagattggctcacagctaaactggcctacgagggactgagcaagacctacctgtccaaaacactggcccagtatacctccaagacctgcagcaattgcggcttcaccatcaccagcgccgactacgacagagtgctggaaaagctcaagaaaaccgccaccggctggatgaccaccatcaacggcaaagagctgaaggttgagggccagatcacctactacaacaggtacaagaggcagaacgtcgtgaaggatctgagcgtggaactggacagactgagcgaagagagcgtgaacaacgacatcagcagctggacaaagggcagatcaggcgaggctctgagcctgctgaagaagaggtttagccacagacctgtgcaagagaagttcgtgtgcctgaactgcggcttcgagacacacgccgatgaacaggctgccctgaacattgccagaagctggctgttcctgagaagccaagagtacaagaagtaccagaccaacaagaccaccggcaacaccgacaagagggcctttgtggaaacctggcagagcttctacagaaaaaagctgaaagaagtctggaagcccgccgtgggatccccaaaaaagaagagaaaggtatacccatatgatgtccctgactacgctggatcctaagaattccggggcgcgtctggaacatcgataatcaacctctggattacaaaatttgtgaaagattgactggtattcttaactatgttgctccttttacgctatgtggatacgctgctttaatgcctttgtatcatgctattgcttcccgtatggctttcattttctcctccttgtataaatcctggttgctgtctctttatgaggagttgtggcccgttgtcaggcaacgtggcgtggtgtgcactgtgtttgctgacgcaacccccactggttggggcattgccaccacctgtcagctcctttccgggactttcgctttccccctccctattgccacggcggaactcatcgccgcctgccttgcccgctgctggacaggggctcggctgttgggcactgacaattccgtggtgttgtcggggaaatcatcgtcctttccttggctgctcgcctgtgttgccacctggattctgcgcgggacgtccttctgctacgtcccttcggccctcaatccagcggaccttccttcccgcggcctgctgccggctctgcggcctcttccgcgtcttcgccttcgccctcagacgagtcggatctccctttgggccgcctccccgaattcctagagctcgctgatcagcctcgactgtgccttctagttgccagccatctgttgtttgcccctcccccgtgccttccttgaccctggaaggtgccactcccactgtcctttcctaataaaatgaggaaattgcatcgcattgtctgagtaggtgtcattctattctggggggtggggtggggcaggacagcaagggggaggattgggaagagaatagcaggcatgctggggaggtaccgtgagggcctatttcccatgattccttcatatttgcatatacgatacaaggctgttagagagataattggaattaatttgactgtaaacacaaagatattagtacaaaatacgtgacgtagaaagtaataatttcttgggtagtttgcagttttaaaattatgttttaaaatggactatcatatgcttaccgtaacttgaaagtatttcgatttcttggctttatatatcttgtggaaaggacgaaacaccactggcgcttttatctgattactttgagagccatcaccagcgactatgtcgtagtgggtaaagctccctcttcggagggagcatcaaaggaggctagaggactgagccattttttttggcggccgcaggaacccctagtgatggagttggccactccctctctgcgcgctcgctcgctcactgaggccgggcgaccaaaggtcgcccgacgcccgggctttgcccgggcggcctcagtgagcgagcgagcgcgcagctgcctgcagg

SEQ ID NO: 229 - DNA, 4619 bp, Artificial Sequence
  AAV construct
cctgcaggcagctgcgcgctcgctcgctcactgaggccgcccgggcgtcgggcgacctttggtcgcccggcctcagtgagcgagcgagcgcgcagagagggagtggccaactccatcactaggggttcctgcggcctctagactcgagggcctccgcgccgggttttggcgcctcccgcgggcgcccccctcctcacggcgagcgctgccacgtcagacgaagggcgcagcgagcgtcctgatccttccgcccggacgctcaggacagcggcccgctgctcataagactcggccttagaaccccagtatcagcagaaggacattttaggacgggacttgggtgactctagggcactggttttctttccagagagcggaacaggcgaggaaaagtagtcccttctcggcgattctgcggagggatctccgtggggcggtgaacgccgatgattatataaggacgcgccgggtgtggcacagctagttccgtcgcagccgggatttgggtcgcggttcttgtttgtggatcgctgtgatcgtcacttggtaccggtgccaccatggccccaaagaagaagcggaaggtctctagacaagagatcaagagaatcaacaagatcagaaggagactggtcaaggacagcaacacaaagaaggccggcaagacaggccccatgaaaaccctgctcgtcagagtgatgacccctgacctgagagagcggctggaaaacctgagaaagaagcccgagaacatccctcagcctatcagcaacaccagcagggccaacctgaacaagctgctgaccgactacaccgagatgaagaaagccatcctgcacgtgtactgggaagagttccagaaagaccccgtgggcctgatgagcagagttgctcagcctgccagcaagaagatcgaccagaacaagctgaagcccgagatggacgagaagggcaatctgaccacagccggctttgcctgctctcagtgtggccagcctctgttcgtgtacaagctggaacaggtgtccgagaaaggcaaggcctacaccaactacttcggcagatgtaacgtggccgagcacgagaagctgattctgctggcccagctgaaacctgagaaggactctgatgaggccgtgacctacagcctgggcaagtttggacagagagccctggacttctacagcatccacgtgaccaaagaaagcacacaccccgtgaagcccctggctcagatcgccggcaatagatacgcctctggacctgtgggcaaagccctgtccgatgcctgcatgggaacaatcgccagcttcctgagcaagtaccaggacatcatcatcgagcaccagaaggtggtcaagggcaaccagaagagactggaaagcctgagggagctggccggcaaagagaacctggaataccccagcgtgaccctgcctcctcagcctcacacaaaagaaggcgtggacgcctacaacgaagtgatcgccagagtgagaatgtgggtcaacctgaacctgtggcagaagctgaaactgtccagggacgacgccaagcctctgctgagactgaagggcttccctagcttccctctggtggaaagacaggccaatgaagtggattggtgggacatggtctgcaacgtgaagaagctgatcaacgagaagaaagaggatggcaaggttttctggcagaacctggccggctacaagagacaagaagccctgaggccttacctgagcagcgaagaggaccggaagaagggcaagaagttcgccagataccagctgggcgacctgctgctgcacctggaaaagaagcacggcgaggactggggcaaagtgtacgatgaggcctgggagagaatcgacaagaaggtggaaggcctgagcaagcacattaagctggaagaggaaagaaggagcgaggacgcccaatctaaagccgctctgaccgattggctgagagccaaggccagctttgtgatcgagggcctgaaagaggccgacaaggacgagttctgcagatgcgagctgaagctgcagaagtggtacggcgatctgagaggcaagcccttcgccattgaggccgagaacagcatcctggacatcagcggcttcagcaagcagtacaactgcgccttcatttggcagaaagacggcgtcaagaaactgaacctgtacctgatcatcaattacttcaaaggcggcaagctgcggttcaagaagatcaaacccgaggccttcgaggctaacagattctacaccgtgatcaacaaaaagtccggcgagatcgtgcccatggaagtgaacttcaacttcgacgaccccaacctgattatcctgcctctggccttcggcaagagacagggcagagagttcatctggaacgatctgctgagcctggaaaccggctctctgaagctggccaatggcagagtgatcgagaaaaccctgtacaacaggagaaccagacaggacgagcctgctctgtttgtggccctgaccttcgagagaagagaggtgctggacagcagcaacatcaagcccatgaacctgatcggcgtggaccggggcgagaatatccctgctgtgatcgccctgacagaccctgaaggatgcccactgagcagattcaaggactccctgggcaaccctacacacatcctgagaatcggcgagagctacaaagagaagcagaggacaatccaggccaagaaagaggtggaacagcgcagagccggcggatactctaggaagtacgccagcaaggccaagaatctggccgacgacatggtccgaaacaccgccagagatctgctgtactacgccgtgacacaggacgccatgctgatcttcgagaatctgagcagaggcttcggccggcagggcaagagaacctttatggccgagaggcagtacaccagaatggaagattggctcacagctaaactggcctacgagggactgagcaagacctacctgtccaaaacactggcccagtatacctccaagacctgcagcaattgcggcttcaccatcaccagcgccgactacgacagagtgctggaaaagctcaagaaaaccgccaccggctggatgaccaccatcaacggcaaagagctgaaggttgagggccagatcacctactacaacaggtacaagaggcagaacgtcgtgaaggatctgagcgtggaactggacagactgagcgaagagagcgtgaacaacgacatcagcagctggacaaagggcagatcaggcgaggctctgagcctgctgaagaagaggtttagccacagacctgtgcaagagaagttcgtgtgcctgaactgcggcttcgagacacacgccgatgaacaggctgccctgaacattgccagaagctggctgttcctgagaagccaagagtacaagaagtaccagaccaacaagaccaccggcaacaccgacaagagggcctttgtggaaacctggcagagcttctacagaaaaaagctgaaagaagtctggaagcccgccgtgggatccccaaaaaagaagagaaaggtatacccatatgatgtccctgactacgctggatcctaagaattccggggcgcgtctggaacgataatcaacctctggattacaaaatttgtgaaagattgactggtattcttaactatgttgctccttttacgctatgtggatacgctgctttaatgcctttgtatcatgctattgcttcccgtatggctttcattttctcctccttgtataaatcctggttagttcttgccacggcggaactcatcgccgcctgccttgcccgctgctggacaggggctcggctgttgggcactgacaattccgtgggaattcctagagctcgctgatcagcctcgactgtgccttctagttgccagccatctgttgtttgcccctcccccgtgccttccttgaccctggaaggtgccactcccactgtcctttcctaataaaatgaggaaattgcatcgcattgtctgagtaggtgtcattctattctggggggtggggtggggcaggacagcaagggggaggattgggaagagaatagcaggcatgctggggaggtaccgtgagggcctatttcccatgattccttcatatttgcatatacgatacaaggctgttagagagataattggaattaatttgactgtaaacacaaagatattagtacaaaatacgtgacgtagaaagtaataatttcttgggtagtttgcagttttaaaattatgttttaaaatggactatcatatgcttaccgtaacttgaaagtatttcgatttcttggctttatatatcttgtggaaaggacgaaacaccactggcgcttttatctgattactttgagagccatcaccagcgactatgtcgtagtgggtaaagctccctcttcggagggagcatcaaaggaggctagaggactgagccattttttttggcggccgcaggaacccctagtgatggagttggccactccctctctgcgcgctcgctcgctcactgaggccgggcgaccaaaggtcgcccgacgcccgggctttgcccgggcggcctcagtgagcgagcgagcgcgcagctgcctgcagg

SEQ ID NO: 230 - DNA, 4550 bp, Artificial Sequence
  AAV construct
cctgcaggcagctgcgcgctcgctcgctcactgaggccgcccgggcgtcgggcgacctttggtcgcccggcctcagtgagcgagcgagcgcgcagagagggagtggccaactccatcactaggggttcctgcggcctctagactcgaggcgttgacattgattattgactagttattaatagtaatcaattacggggtcattagttcatagcccatatatggagttccgcgttacataacttacggtaaatggcccgcctggctgaccgcccaacgacccccgcccattgacgtcaataatgacgtatgttcccatagtaacgccaatagggactttccattgacgtcaatgggtggagtatttacggtaaactgcccacttggcagtacatcaagtgtatcatatgccaagtacgccccctattgacgtcaatgacggtaaatggcccgcctggcattatgcccagtacatgaccttatgggactttcctacttggcagtacatctacgtattagtcatcgctattaccatggtgatgcggttttggcagtacatcaatgggcgtggatagcggtttgactcacggggatttccaagtctccaccccattgacgtcaatgggagtttgttttggcaccaaaatcaacgggactttccaaaatgtcgtaacaactccgccccattgacgcaaatgggcggtaggcgtgtacggtgggaggtctatataagcagagctctctggctaactaccggtgccaccatggccccaaagaagaagcggaaggtctctagacaagagatcaagagaatcaacaagatcagaaggagactggtcaaggacagcaacacaaagaaggccggcaagacaggccccatgaaaaccctgctcgtcagagtgatgacccctgacctgagagagcggctggaaaacctgagaaagaagcccgagaacatccctcagcctatcagcaacaccagcagggccaacctgaacaagctgctgaccgactacaccgagatgaagaaagccatcctgcacgtgtactgggaagagttccagaaagaccccgtgggcctgatgagcagagttgctcagcctgccagcaagaagatcgaccagaacaagctgaagcccgagatggacgagaagggcaatctgaccacagccggctttgcctgctctcagtgtggccagcctctgttcgtgtacaagctggaacaggtgtccgagaaaggcaaggcctacaccaactacttcggcagatgtaacgtggccgagcacgagaagctgattctgctggcccagctgaaacctgagaaggactctgatgaggccgtgacctacagcctgggcaagtttggacagagagccctggacttctacagcatccacgtgaccaaagaaagcacacaccccgtgaagcccctggctcagatcgccggcaatagatacgcctctggacctgtgggcaaagccctgtccgatgcctgcatgggaacaatcgccagcttcctgagcaagtaccaggacatcatcatcgagcaccagaaggtggtcaagggcaaccagaagagactggaaagcctgagggagctggccggcaaagagaacctggaataccccagcgtgaccctgcctcctcagcctcacacaaaagaaggcgtggacgcctacaacgaagtgatcgccagagtgagaatgtgggtcaacctgaacctgtggcagaagctgaaactgtccagggacgacgccaagcctctgctgagactgaagggcttccctagcttccctctggtggaaagacaggccaatgaagtggattggtgggacatggtctgcaacgtgaagaagctgatcaacgagaagaaagaggatggcaaggttttctggcagaacctggccggctacaagagacaagaagccctgaggccttacctgagcagcgaagaggaccggaagaagggcaagaagttcgccagataccagctgggcgacctgctgctgcacctggaaaagaagcacggcgaggactggggcaaagtgtacgatgaggcctgggagagaatcgacaagaaggtggaaggcctgagcaagcacattaagctggaagaggaaagaaggagcgaggacgcccaatctaaagccgctctgaccgattggctgagagccaaggccagctttgtgatcgagggcctgaaagaggccgacaaggacgagttctgcagatgcgagctgaagctgcagaagtggtacggcgatctgagaggcaagcccttcgccattgaggccgagaacagcatcctggacatcagcggcttcagcaagcagtacaactgcgccttcatttggcagaaagacggcgtcaagaaactgaacctgtacctgatcatcaattacttcaaaggcggcaagctgcggttcaagaagatcaaacccgaggccttcgaggctaacagattctacaccgtgatcaacaaaaagtccggcgagatcgtgcccatggaagtgaacttcaacttcgacgaccccaacctgattatcctgcctctggccttcggcaagagacagggcagagagttcatctggaacgatctgctgagcctggaaaccggctctctgaagctggccaatggcagagtgatcgagaaaaccctgtacaacaggagaaccagacaggacgagcctgctctgtttgtggccctgaccttcgagagaagagaggtgctggacagcagcaacatcaagcccatgaacctgatcggcgtggaccggggcgagaatatccctgctgtgatcgccctgacagaccctgaaggatgcccactgagcagattcaaggactccctgggcaaccctacacacatcctgagaatcggcgagagctacaaagagaagcagaggacaatccaggccaagaaagaggtggaacagcgcagagccggcggatactctaggaagtacgccagcaaggccaagaatctggccgacgacatggtccgaaacaccgccagagatctgctgtactacgccgtgacacaggacgccatgctgatcttcgagaatctgagcagaggcttcggccggcagggcaagagaacctttatggccgagaggcagtacaccagaatggaagattggctcacagctaaactggcctacgagggactgagcaagacctacctgtccaaaacactggcccagtatacctccaagacctgcagcaattgcggcttcaccatcaccagcgccgactacgacagagtgctggaaaagctcaagaaaaccgccaccggctggatgaccaccatcaacggcaaagagctgaaggttgagggccagatcacctactacaacaggtacaagaggcagaacgtcgtgaaggatctgagcgtggaactggacagactgagcgaagagagcgtgaacaacgacatcagcagctggacaaagggcagatcaggcgaggctctgagcctgctgaagaagaggtttagccacagacctgtgcaagagaagttcgtgtgcctgaactgcggcttcgagacacacgccgatgaacaggctgccctgaacattgccagaagctggctgttcctgagaagccaagagtacaagaagtaccagaccaacaagaccaccggcaacaccgacaagagggcctttgtggaaacctggcagagcttctacagaaaaaagctgaaagaagtctggaagcccgccgtgggatccccaaaaaagaagagaaaggtatacccatatgatgtccctgactacgctggatcctaagaattcctagagctcgctgatcagcctcgactgtgccttctagttgccagccatctgttgtttgcccctcccccgtgccttccttgaccctggaaggtgccactcccactgtcctttcctaataaaatgaggaaattgcatcgcattgtctgagtaggtgtcattctattctggggggtggggtggggcaggacagcaagggggaggattgggaagagaatagcaggcatgctggggaggtaccgtgagggcctatttcccatgattccttcatatttgcatatacgatacaaggctgttagagagataattggaattaatttgactgtaaacacaaagatattagtacaaaatacgtgacgtagaaagtaataatttcttgggtagtttgcagttttaaaattatgttttaaaatggactatcatatgcttaccgtaacttgaaagtatttcgatttcttggctttatatatcttgtggaaaggacgaaacaccactggcgcttttatctgattactttgagagccatcaccagcgactatgtcgtagtgggtaaagctccctcttcggagggagcatcaaagtggcttcctggtgaagatgattttttttggcggccgcaggaacccctagtgatggagttggccactccctctctgcgcgctcgctcgctcactgaggccgggcgaccaaaggtcgcccgacgcccgggctttgcccgggcggcctcagtgagcgagcgagcgcgcagctgcctgcagg

SEQ ID NO: 231 - DNA, 4965 bp, Artificial Sequence
  AAV construct
cctgcaggcagctgcgcgctcgctcgctcactgaggccgcccgggcgtcgggcgacctttggtcgcccggcctcagtgagcgagcgagcgcgcagagagggagtggccaactccatcactaggggttcctgcggcctctagactcgagggcctccgcgccgggttttggcgcctcccgcgggcgcccccctcctcacggcgagcgctgccacgtcagacgaagggcgcagcgagcgtcctgatccttccgcccggacgctcaggacagcggcccgctgctcataagactcggccttagaaccccagtatcagcagaaggacattttaggacgggacttgggtgactctagggcactggttttctttccagagagcggaacaggcgaggaaaagtagtcccttctcggcgattctgcggagggatctccgtggggcggtgaacgccgatgattatataaggacgcgccgggtgtggcacagctagttccgtcgcagccgggatttgggtcgcggttcttgtttgtggatcgctgtgatcgtcacttggtaccggtgccaccatggccccaaagaagaagcggaaggtctctagacaagagatcaagagaatcaacaagatcagaaggagactggtcaaggacagcaacacaaagaaggccggcaagacaggccccatgaaaaccctgctcgtcagagtgatgacccctgacctgagagagcggctggaaaacctgagaaagaagcccgagaacatccctcagcctatcagcaacaccagcagggccaacctgaacaagctgctgaccgactacaccgagatgaagaaagccatcctgcacgtgtactgggaagagttccagaaagaccccgtgggcctgatgagcagagttgctcagcctgccagcaagaagatcgaccagaacaagctgaagcccgagatggacgagaagggcaatctgaccacagccggctttgcctgctctcagtgtggccagcctctgttcgtgtacaagctggaacaggtgtccgagaaaggcaaggcctacaccaactacttcggcagatgtaacgtggccgagcacgagaagctgattctgctggcccagctgaaacctgagaaggactctgatgaggccgtgacctacagcctgggcaagtttggacagagagccctggacttctacagcatccacgtgaccaaagaaagcacacaccccgtgaagcccctggctcagatcgccggcaatagatacgcctctggacctgtgggcaaagccctgtccgatgcctgcatgggaacaatcgccagcttcctgagcaagtaccaggacatcatcatcgagcaccagaaggtggtcaagggcaaccagaagagactggaaagcctgagggagctggccggcaaagagaacctggaataccccagcgtgaccctgcctcctcagcctcacacaaaagaaggcgtggacgcctacaacgaagtgatcgccagagtgagaatgtgggtcaacctgaacctgtggcagaagctgaaactgtccagggacgacgccaagcctctgctgagactgaagggcttccctagcttccctctggtggaaagacaggccaatgaagtggattggtgggacatggtctgcaacgtgaagaagctgatcaacgagaagaaagaggatggcaaggttttctggcagaacctggccggctacaagagacaagaagccctgaggccttacctgagcagcgaagaggaccggaagaagggcaagaagttcgccagataccagctgggcgacctgctgctgcacctggaaaagaagcacggcgaggactggggcaaagtgtacgatgaggcctgggagagaatcgacaagaaggtggaaggcctgagcaagcacattaagctggaagaggaaagaaggagcgaggacgcccaatctaaagccgctctgaccgattggctgagagccaaggccagctttgtgatcgagggcctgaaagaggccgacaaggacgagttctgcagatgcgagctgaagctgcagaagtggtacggcgatctgagaggcaagcccttcgccattgaggccgagaacagcatcctggacatcagcggcttcagcaagcagtacaactgcgccttcatttggcagaaagacggcgtcaagaaactgaacctgtacctgatcatcaattacttcaaaggcggcaagctgcggttcaagaagatcaaacccgaggccttcgaggctaacagattctacaccgtgatcaacaaaaagtccggcgagatcgtgcccatggaagtgaacttcaacttcgacgaccccaacctgattatcctgcctctggccttcggcaagagacagggcagagagttcatctggaacgatctgctgagcctggaaaccggctctctgaagctggccaatggcagagtgatcgagaaaaccctgtacaacaggagaaccagacaggacgagcctgctctgtttgtggccctgaccttcgagagaagagaggtgctggacagcagcaacatcaagcccatgaacctgatcggcgtggaccggggcgagaatatccctgctgtgatcgccctgacagaccctgaaggatgcccactgagcagattcaaggactccctgggcaaccctacacacatcctgagaatcggcgagagctacaaagagaagcagaggacaatccaggccaagaaagaggtggaacagcgcagagccggcggatactctaggaagtacgccagcaaggccaagaatctggccgacgacatggtccgaaacaccgccagagatctgctgtactacgccgtgacacaggacgccatgctgatcttcgagaatctgagcagaggcttcggccggcagggcaagagaacctttatggccgagaggcagtacaccagaatggaagattggctcacagctaaactggcctacgagggactgagcaagacctacctgtccaaaacactggcccagtatacctccaagacctgcagcaattgcggcttcaccatcaccagcgccgactacgacagagtgctggaaaagctcaagaaaaccgccaccggctggatgaccaccatcaacggcaaagagctgaaggttgagggccagatcacctactacaacaggtacaagaggcagaacgtcgtgaaggatctgagcgtggaactggacagactgagcgaagagagcgtgaacaacgacatcagcagctggacaaagggcagatcaggcgaggctctgagcctgctgaagaagaggtttagccacagacctgtgcaagagaagttcgtgtgcctgaactgcggcttcgagacacacgccgatgaacaggctgccctgaacattgccagaagctggctgttcctgagaagccaagagtacaagaagtaccagaccaacaagaccaccggcaacaccgacaagagggcctttgtggaaacctggcagagcttctacagaaaaaagctgaaagaagtctggaagcccgccgtgggatccccaaaaaagaagagaaaggtatacccatatgatgtccctgactacgctggatcctaagaattccggggcgcgtctggaacatcgataatcaacctctggattacaaaatttgtgaaagattgactggtattcttaactatgttgctccttttacgctatgtggatacgctgctttaatgcctttgtatcatgctattgcttcccgtatggctttcattttctcctccttgtataaatcctggttgctgtctctttatgaggagttgtggcccgttgtcaggcaacgtggcgtggtgtgcactgtgtttgctgacgcaacccccactggttggggcattgccaccacctgtcagctcctttccgggactttcgctttccccctccctattgccacggcggaactcatcgccgcctgccttgcccgctgctggacaggggctcggctgttgggcactgacaattccgtggtgttgtcggggaaatcatcgtcctttccttggctgctcgcctgtgttgccacctggattctgcgcgggacgtccttctgctacgtcccttcggccctcaatccagcggaccttccttcccgcggcctgctgccggctctgcggcctcttccgcgtcttcgccttcgccctcagacgagtcggatctccctttgggccgcctccccgaattcctagagctcgctgatcagcctcgactgtgccttctagttgccagccatctgttgtttgcccctcccccgtgccttccttgaccctggaaggtgccactcccactgtcctttcctaataaaatgaggaaattgcatcgcattgtctgagtaggtgtcattctattctggggggtggggtggggcaggacagcaagggggaggattgggaagagaatagcaggcatgctggggaggtaccgtgagggcctatttcccatgattccttcatatttgcatatacgatacaaggctgttagagagataattggaattaatttgactgtaaacacaaagatattagtacaaaatacgtgacgtagaaagtaataatttcttgggtagtttgcagttttaaaattatgttttaaaatggactatcatatgcttaccgtaacttgaaagtatttcgatttcttggctttatatatcttgtggaaaggacgaaacaccactggcgcttttatctgattactttgagagccatcaccagcgactatgtcgtagtgggtaaagctccctcttcggagggagcatcaaagtggcttcctggtgaagatgattttttttggcggccgcaggaacccctagtgatggagttggccactccctctctgcgcgctcgctcgctcactgaggccgggcgaccaaaggtcgcccgacgcccgggctttgcccgggcggcctcagtgagcgagcgagcgcgcagctgcctgcagg

SEQ ID NO: 232 - DNA, 4619 bp, Artificial Sequence
  AAV construct
cctgcaggcagctgcgcgctcgctcgctcactgaggccgcccgggcgtcgggcgacctttggtcgcccggcctcagtgagcgagcgagcgcgcagagagggagtggccaactccatcactaggggttcctgcggcctctagactcgagggcctccgcgccgggttttggcgcctcccgcgggcgcccccctcctcacggcgagcgctgccacgtcagacgaagggcgcagcgagcgtcctgatccttccgcccggacgctcaggacagcggcccgctgctcataagactcggccttagaaccccagtatcagcagaaggacattttaggacgggacttgggtgactctagggcactggttttctttccagagagcggaacaggcgaggaaaagtagtcccttctcggcgattctgcggagggatctccgtggggcggtgaacgccgatgattatataaggacgcgccgggtgtggcacagctagttccgtcgcagccgggatttgggtcgcggttcttgtttgtggatcgctgtgatcgtcacttggtaccggtgccaccatggccccaaagaagaagcggaaggtctctagacaagagatcaagagaatcaacaagatcagaaggagactggtcaaggacagcaacacaaagaaggccggcaagacaggccccatgaaaaccctgctcgtcagagtgatgacccctgacctgagagagcggctggaaaacctgagaaagaagcccgagaacatccctcagcctatcagcaacaccagcagggccaacctgaacaagctgctgaccgactacaccgagatgaagaaagccatcctgcacgtgtactgggaagagttccagaaagaccccgtgggcctgatgagcagagttgctcagcctgccagcaagaagatcgaccagaacaagctgaagcccgagatggacgagaagggcaatctgaccacagccggctttgcctgctctcagtgtggccagcctctgttcgtgtacaagctggaacaggtgtccgagaaaggcaaggcctacaccaactacttcggcagatgtaacgtggccgagcacgagaagctgattctgctggcccagctgaaacctgagaaggactctgatgaggccgtgacctacagcctgggcaagtttggacagagagccctggacttctacagcatccacgtgaccaaagaaagcacacaccccgtgaagcccctggctcagatcgccggcaatagatacgcctctggacctgtgggcaaagccctgtccgatgcctgcatgggaacaatcgccagcttcctgagcaagtaccaggacatcatcatcgagcaccagaaggtggtcaagggcaaccagaagagactggaaagcctgagggagctggccggcaaagagaacctggaataccccagcgtgaccctgcctcctcagcctcacacaaaagaaggcgtggacgcctacaacgaagtgatcgccagagtgagaatgtgggtcaacctgaacctgtggcagaagctgaaactgtccagggacgacgccaagcctctgctgagactgaagggcttccctagcttccctctggtggaaagacaggccaatgaagtggattggtgggacatggtctgcaacgtgaagaagctgatcaacgagaagaaagaggatggcaaggttttctggcagaacctggccggctacaagagacaagaagccctgaggccttacctgagcagcgaagaggaccggaagaagggcaagaagttcgccagataccagctgggcgacctgctgctgcacctggaaaagaagcacggcgaggactggggcaaagtgtacgatgaggcctgggagagaatcgacaagaaggtggaaggcctgagcaagcacattaagctggaagaggaaagaaggagcgaggacgcccaatctaaagccgctctgaccgattggctgagagccaaggccagctttgtgatcgagggcctgaaagaggccgacaaggacgagttctgcagatgcgagctgaagctgcagaagtggtacggcgatctgagaggcaagcccttcgccattgaggccgagaacagcatcctggacatcagcggcttcagcaagcagtacaactgcgccttcatttggcagaaagacggcgtcaagaaactgaacctgtacctgatcatcaattacttcaaaggcggcaagctgcggttcaagaagatcaaacccgaggccttcgaggctaacagattctacaccgtgatcaacaaaaagtccggcgagatcgtgcccatggaagtgaacttcaacttcgacgaccccaacctgattatcctgcctctggccttcggcaagagacagggcagagagttcatctggaacgatctgctgagcctggaaaccggctctctgaagctggccaatggcagagtgatcgagaaaaccctgtacaacaggagaaccagacaggacgagcctgctctgtttgtggccctgaccttcgagagaagagaggtgctggacagcagcaacatcaagcccatgaacctgatcggcgtggaccggggcgagaatatccctgctgtgatcgccctgacagaccctgaaggatgcccactgagcagattcaaggactccctgggcaaccctacacacatcctgagaatcggcgagagctacaaagagaagcagaggacaatccaggccaagaaagaggtggaacagcgcagagccggcggatactctaggaagtacgccagcaaggccaagaatctggccgacgacatggtccgaaacaccgccagagatctgctgtactacgccgtgacacaggacgccatgctgatcttcgagaatctgagcagaggcttcggccggcagggcaagagaacctttatggccgagaggcagtacaccagaatggaagattggctcacagctaaactggcctacgagggactgagcaagacctacctgtccaaaacactggcccagtatacctccaagacctgcagcaattgcggcttcaccatcaccagcgccgactacgacagagtgctggaaaagctcaagaaaaccgccaccggctggatgaccaccatcaacggcaaagagctgaaggttgagggccagatcacctactacaacaggtacaagaggcagaacgtcgtgaaggatctgagcgtggaactggacagactgagcgaagagagcgtgaacaacgacatcagcagctggacaaagggcagatcaggcgaggctctgagcctgctgaagaagaggtttagccacagacctgtgcaagagaagttcgtgtgcctgaactgcggcttcgagacacacgccgatgaacaggctgccctgaacattgccagaagctggctgttcctgagaagccaagagtacaagaagtaccagaccaacaagaccaccggcaacaccgacaagagggcctttgtggaaacctggcagagcttctacagaaaaaagctgaaagaagtctggaagcccgccgtgggatccccaaaaaagaagagaaaggtatacccatatgatgtccctgactacgctggatcctaagaattccggggcgcgtctggaacgataatcaacctctggattacaaaatttgtgaaagattgactggtattcttaactatgttgctccttttacgctatgtggatacgctgctttaatgcctttgtatcatgctattgcttcccgtatggctttcattttctcctccttgtataaatcctggttagttcttgccacggcggaactcatcgccgcctgccttgcccgctgctggacaggggctcggctgttgggcactgacaattccgtgggaattcctagagctcgctgatcagcctcgactgtgccttctagttgccagccatctgttgtttgcccctcccccgtgccttccttgaccctggaaggtgccactcccactgtcctttcctaataaaatgaggaaattgcatcgcattgtctgagtaggtgtcattctattctggggggtggggtggggcaggacagcaagggggaggattgggaagagaatagcaggcatgctggggaggtaccgtgagggcctatttcccatgattccttcatatttgcatatacgatacaaggctgttagagagataattggaattaatttgactgtaaacacaaagatattagtacaaaatacgtgacgtagaaagtaataatttcttgggtagtttgcagttttaaaattatgttttaaaatggactatcatatgcttaccgtaacttgaaagtatttcgatttcttggctttatatatcttgtggaaaggacgaaacaccactggcgcttttatctgattactttgagagccatcaccagcgactatgtcgtagtgggtaaagctccctcttcggagggagcatcaaagtggcttcctggtgaagatgattttttttggcggccgcaggaacccctagtgatggagttggccactccctctctgcgcgctcgctcgctcactgaggccgggcgaccaaaggtcgcccgacgcccgggctttgcccgggcggcctcagtgagcgagcgagcgcgcagctgcctgcagg

SEQ ID NO: 233 - DNA, 20 bp, Mus musculus
gcctcgccctccccagacag

SEQ ID NO: 234 - DNA, 20 bp, Mus musculus
gatggggctcggggtggcgt

SEQ ID NO: 235 - DNA, 20 bp, Mus musculus
ggggtgtgggtactggacgc

SEQ ID NO: 236 - DNA, 20 bp, Mus musculus
cgtggacgcgcaggctgccg

SEQ ID NO: 237 - DNA, 20 bp, Mus musculus
gaggctagaggactgagcca

SEQ ID NO: 238 - DNA, 20 bp, Mus musculus
cgaggccgcgcgcacctctc

SEQ ID NO: 239 - DNA, 20 bp, Mus musculus
taatctccatcctcgtcctg

SEQ ID NO: 240 - RNA, 20 nt, Mus musculus
gccucgcccuccccagacag

SEQ ID NO: 241 - RNA, 20 nt, Mus musculus
gauggggcucgggguggcgu

SEQ ID NO: 242 - RNA, 20 nt, Mus musculus
gggguguggguacuggacgc

SEQ ID NO: 243 - RNA, 20 nt, Mus musculus
cguggacgcgcaggcugccg

SEQ ID NO: 244 - RNA, 20 nt, Mus musculus
gaggcuagaggacugagcca

SEQ ID NO: 245 - RNA, 20 nt, Mus musculus
cgaggccgcgcgcaccucuc

SEQ ID NO: 246 - RNA, 20 nt, Mus musculus
uaaucuccauccucguccug

SEQ ID NO: 247 - RNA, 20 nt, Artificial Sequence
  targeting sequence to human PCSK9 variant
ugguggccgcugccaugcug

SEQ ID NO: 248 - RNA, 20 nt, Artificial Sequence
  targeting sequence to human PCSK9 variant
cacgggcgcccgugcgcagg

SEQ ID NO: 249 - RNA, 20 nt, Artificial Sequence
  targeting sequence to human PCSK9 variant
ugcgcacgggcgcccguggg

SEQ ID NO: 250 - RNA, 20 nt, Artificial Sequence
  targeting sequence to human PCSK9 variant
ugggucccacgggcgcccgu

SEQ ID NO: 251 - RNA, 20 nt, Artificial Sequence
  targeting sequence to human PCSK9 variant
cgcgggcgccgugcgcagga

SEQ ID NO: 252 - RNA, 20 nt, Artificial Sequence
  targeting sequence to human PCSK9 variant
uccuccugcgcacggcgccc

SEQ ID NO: 253 - RNA, 20 nt, Artificial Sequence
  targeting sequence to human PCSK9 variant
uccugcgcacggcgcccgcg

SEQ ID NO: 254 - RNA, 20 nt, Artificial Sequence
  targeting sequence to human PCSK9 variant
ugcgcacggcgcccgcggga

SEQ ID NO: 255 - RNA, 20 nt, Artificial Sequence
  targeting sequence to human PCSK9 variant
ugggucccgcgggcgccgug

SEQ ID NO: 256 - RNA, 20 nt, Artificial Sequence
  targeting sequence to human PCSK9 variant
caacgcaaggcuagcaccag

SEQ ID NO: 257 - RNA, 20 nt, Artificial Sequence
  targeting sequence to human PCSK9 variant
uccucgcaacgcaaggcuag

SEQ ID NO: 258 - RNA, 20 nt, Artificial Sequence
  targeting sequence to human PCSK9 variant
ucgcaacgcaaggcuagcac

SEQ ID NO: 259 - RNA, 20 nt, Artificial Sequence
  targeting sequence to human PCSK9 variant
cccaggccguccuccucgga

SEQ ID NO: 260 - RNA, 20 nt, Artificial Sequence
  targeting sequence to human PCSK9 variant
gaggaggacggccugggcga

SEQ ID NO: 261 - RNA, 20 nt, Artificial Sequence
  targeting sequence to human PCSK9 variant
ggugcuucgcccaggccguc

SEQ ID NO: 262 - RNA, 20 nt, Artificial Sequence
  targeting sequence to human PCSK9 variant
gugcucgggugcuucgccca

SEQ ID NO: 263 - RNA, 20 nt, Artificial Sequence
  targeting sequence to human PCSK9 variant
gugguuccgugcucgggugc

SEQ ID NO: 264 - RNA, 20 nt, Artificial Sequence
  targeting sequence to human PCSK9 variant
caucccuacaccugcaccuu

SEQ ID NO: 265 - RNA, 20 nt, Artificial Sequence
  targeting sequence to human PCSK9 variant
cuacaccugcaccuuggcgc

SEQ ID NO: 266 - RNA, 20 nt, Artificial Sequence
  targeting sequence to human PCSK9 variant
ccuccgucagcaccaccacg

SEQ ID NO: 267 - RNA, 20 nt, Artificial Sequence
  targeting sequence to human PCSK9 variant
gucagcaccaccacguaggu

SEQ ID NO: 268 - RNA, 20 nt, Artificial Sequence
  targeting sequence to human PCSK9 variant
uccgucagcaccaccacgua

SEQ ID NO: 269 - RNA, 20 nt, Artificial Sequence
  targeting sequence to human PCSK9 variant
gagcgcacugccugccgccu

SEQ ID NO: 270 - RNA, 20 nt, Artificial Sequence
  targeting sequence to human PCSK9 variant
uggugggguauccccggcgg

SEQ ID NO: 271 - RNA, 20 nt, Artificial Sequence
  targeting sequence to human PCSK9 variant
uggugcgguauccccggcgg

SEQ ID NO: 272 - RNA, 20 nt, Artificial Sequence
  targeting sequence to human PCSK9 variant
agcaggucgccucucaucuu

SEQ ID NO: 273 - RNA, 20 nt, Artificial Sequence
  targeting sequence to human PCSK9 variant
caucuucaccaggaagccag

SEQ ID NO: 274 - RNA, 20 nt, Artificial Sequence
  targeting sequence to human PCSK9 variant
ccucucaucuucaccaggaa

SEQ ID NO: 275 - RNA, 20 nt, Artificial Sequence
  targeting sequence to human PCSK9 variant
uggugaagaugagaggcgac

SEQ ID NO: 276 - RNA, 20 nt, Artificial Sequence
  targeting sequence to human PCSK9 variant
aaguuggugaccaugacccu

SEQ ID NO: 277 - RNA, 20 nt, Artificial Sequence
  targeting sequence to human PCSK9 variant
ccaacuucgagaaugugccc

SEQ ID NO: 278 - RNA, 20 nt, Artificial Sequence
  targeting sequence to human PCSK9 variant
cgaaguuggugaccaugacc

SEQ ID NO: 279 - RNA, 20 nt, Artificial Sequence
  targeting sequence to human PCSK9 variant
ggcacauucucgaaguuggu

SEQ ID NO: 280 - RNA, 20 nt, Artificial Sequence
  targeting sequence to human PCSK9 variant
uggucaccaacuucgagaau

SEQ ID NO: 281 - RNA, 20 nt, Artificial Sequence
  targeting sequence to human PCSK9 variant
guggaggcgggucccguccu

SEQ ID NO: 282 - RNA, 20 nt, Artificial Sequence
  targeting sequence to human PCSK9 variant
cacuugcuggccugcuagac

SEQ ID NO: 283 - RNA, 20 nt, Artificial Sequence
  targeting sequence to human PCSK9 variant
ucuagcaggccagcaagugu

SEQ ID NO: 284 - RNA, 20 nt, Artificial Sequence
  targeting sequence to human PCSK9 variant
uuguguucgucuagcaggcc

SEQ ID NO: 285 - RNA, 20 nt, Artificial Sequence
  targeting sequence to human PCSK9 variant
acacagcggccaaagauggu

SEQ ID NO: 286 - RNA, 20 nt, Artificial Sequence
  targeting sequence to human PCSK9 variant
uuggccgcuguguggaccuc

SEQ ID NO: 287 - RNA, 20 nt, Artificial Sequence
  targeting sequence to human PCSK9 variant
agccacugcagcaccugcuu

SEQ ID NO: 288 - RNA, 20 nt, Artificial Sequence
  targeting sequence to human PCSK9 variant
uuggugccuccagccacugc

SEQ ID NO: 289 - RNA, 20 nt, Artificial Sequence
  targeting sequence to human PCSK9 variant
agcuacugcagcaccugcuu

SEQ ID NO: 290 - RNA, 20 nt, Artificial Sequence
  targeting sequence to human PCSK9 variant
uuggugccuccagcuacugc

SEQ ID NO: 291 - RNA, 20 nt, Artificial Sequence
  targeting sequence to human PCSK9 variant
caggcugcugcccacauggc

SEQ ID NO: 292 - RNA, 20 nt, Artificial Sequence
  targeting sequence to human PCSK9 variant
gcacacucggggccugcacg

SEQ ID NO: 293 - RNA, 20 nt, Artificial Sequence
  targeting sequence to human PCSK9 variant
gggccugcacggauggccac

SEQ ID NO: 294 - RNA, 20 nt, Artificial Sequence
  targeting sequence to human PCSK9 variant
gugcaggccccgagugugcu

SEQ ID NO: 295 - RNA, 20 nt, Artificial Sequence
  targeting sequence to human PCSK9 variant
acagccgucgcccgcugcgc

SEQ ID NO: 296 - RNA, 20 nt, Artificial Sequence
  targeting sequence to human PCSK9 variant
gggccuacacggauguccac

SEQ ID NO: 297 - RNA, 20 nt, Artificial Sequence
  targeting sequence to human PCSK9 variant
ccugcugcgccccagaugag

SEQ ID NO: 298 - RNA, 20 nt, Artificial Sequence
  targeting sequence to human PCSK9 variant
ggggcgcagcaggcgacggc

SEQ ID NO: 299 - RNA, 20 nt, Artificial Sequence
  targeting sequence to human PCSK9 variant
ucaucuggggcgcagcaggc

SEQ ID NO: 300 - RNA, 20 nt, Artificial Sequence
  targeting sequence to human PCSK9 variant
ucuggggcgcagcaggcgac

SEQ ID NO: 301 - RNA, 20 nt, Artificial Sequence
  targeting sequence to human PCSK9 variant
augcgcucgccccgccgcuu

SEQ ID NO: 302 - RNA, 20 nt, Artificial Sequence
  targeting sequence to human PCSK9 variant
cuuccaugcgcucgccccgc

SEQ ID NO: 303 - RNA, 20 nt, Artificial Sequence
  targeting sequence to human PCSK9 variant
cggccccuuggcuggugcug

SEQ ID NO: 304 - protein, 57 aa, Unknown
  chloroplast transit peptide
MASMISSSAVTTVSRASRGQSAAMAPFGGLKSMTGFPVRKVNTDITSITSNGGRVKS

SEQ ID NO: 305 - protein, 76 aa, Unknown
  chloroplast transit peptide
MAQVSRICNGVQNPSLISNLSKSSQRKSPLSVSLKTQQHPRAYPISSSWGLKKSGMTLIGSELRPLKVMSSVSTAC

SEQ ID NO: 306 - protein, 76 aa, Unknown
  chloroplast transit peptide
MAQVSRICNGVWNPSLISNLSKSSQRKSPLSVSLKTQQHPRAYPISSSWGLKKSGMTLIGSELRPLKVMSSVSTAC

SEQ ID NO: 307 - protein, 72 aa, Unknown
  chloroplast transit peptide
MAQINNMAQGIQTLNPNSNFHKPQVPKSSSFLVFGSKKLKNSANSMLVLKKDSIFMQLFCSFRISASVATAC

SEQ ID NO: 308 - protein, 69 aa, Unknown
  chloroplast transit peptide
MAALVTSQLATSGTVLSVTDRFRRPGFQGLRPRNPADAALGMRTVGASAAPKQSRKPHRFDRRCLSMVV

SEQ ID NO: 309 - protein, 77 aa, Unknown
  chloroplast transit peptide
MAALTTSQLATSATGFGIADRSAPSSLLRHGFQGLKPRSPAGGDATSLSVTTSARATPKQQRSVQRGSRRFPSVVVC

SEQ ID NO: 310 - protein, 57 aa, Unknown
  chloroplast transit peptide
MASSVLSSAAVATRSNVAQANMVAPFTGLKSAASFPVSRKQNLDITSIASNGGRVQC

SEQ ID NO: 311 - protein, 72 aa, Unknown
  chloroplast transit peptide
MGAAATSMQSLKFSNRLVPPSRRLSPVPNNVTCNNLPKSAAPVRTVKCCASSWNSTINGAAATTNGASAASS

SEQ ID NO: 312 - protein, 20 aa, Unknown
  chloroplast transit peptide
  MISC_FEATURE (4)..(4): Xaa is Lys, His or Arg
  MISC_FEATURE (8)..(8): Xaa is Lys, His or Arg
  MISC_FEATURE (11)..(11): Xaa is Lys, His or Arg
  MISC_FEATURE (15)..(15): Xaa is Lys, His or Arg
  MISC_FEATURE (19)..(19): Xaa is Lys, His or Arg
GLFXALLXLLXSLWXLLLXA

SEQ ID NO: 313 - protein, 20 aa, Unknown
  chloroplast transit peptide
GLFHALLHLLHSLWHLLLHA

SEQ ID NO: 314 - protein, 9 aa, Unknown
  chloroplast transit peptide
HHHHHHHHH

SEQ ID NO: 315 - RNA, 20 nt, Artificial Sequence
  targeting sequence with ATCN PAM
gaaucaucagaaugucauag

SEQ ID NO: 316 - RNA, 20 nt, Artificial Sequence
  targeting sequence with ATCN PAM
ucagaaugucauagagaaau

SEQ ID NO: 317 - RNA, 20 nt, Artificial Sequence
  targeting sequence with ATCN PAM
gaaugucauagagaaauaau

SEQ ID NO: 318 - RNA, 20 nt, Artificial Sequence
  targeting sequence with ATCN PAM
aaaggaucagaaucuaguuu

SEQ ID NO: 319 - RNA, 20 nt, Artificial Sequence
  targeting sequence with ATCN PAM
uuuugauuauuucucuauga

SEQ ID NO: 320 - RNA, 20 nt, Artificial Sequence
  targeting sequence with ATCN PAM
gaaucuaguuuaaaagaguu

SEQ ID NO: 321 - RNA, 20 nt, Artificial Sequence
  targeting sequence with ATCN PAM
aguuuaaaagaguuaauuca

SEQ ID NO: 322 - RNA, 20 nt, Artificial Sequence
  targeting sequence with ATCN PAM
ucagcuuugcgcuugaauua

SEQ ID NO: 323 - RNA, 20 nt, Artificial Sequence
  targeting sequence with ATCN PAM
gggaaacacagacucuaaau

SEQ ID NO: 324 - RNA, 20 nt, Artificial Sequence
  targeting sequence with ATCN PAM
cugugguaagaauuaggaug

SEQ ID NO: 325 - RNA, 20 nt, Artificial Sequence
  targeting sequence with ATCN PAM
ccuacacauaaaaaguugua

SEQ ID NO: 326 - RNA, 20 nt, Artificial Sequence
  targeting sequence with ATCN PAM
uaggagaggaaugaacuuaa

SEQ ID NO: 327 - RNA, 20 nt, Artificial Sequence
  targeting sequence with ATCN PAM
ucuuccagaagagcccaguu

SEQ ID NO: 328 - RNA, 20 nt, Artificial Sequence
  targeting sequence with ATCN PAM
guguaauugucccuuacuug

SEQ ID NO: 329 - RNA, 20 nt, Artificial Sequence
  targeting sequence with ATCN PAM
acaaauuuaauguauuuuuc

SEQ ID NO: 330 - RNA, 20 nt, Artificial Sequence
  targeting sequence with ATCN PAM
uaacuaagcacuuaccaugc

SEQ ID NO: 331 - RNA, 20 nt, Artificial Sequence
  targeting sequence with ATCN PAM
uuugcaauuuaaggugugac

SEQ ID NO: 332 - RNA, 20 nt, Artificial Sequence
  targeting sequence with ATCN PAM
agaacuuucuucuucucacu

SEQ ID NO: 333 - RNA, 20 nt, Artificial Sequence
  targeting sequence with ATCN PAM
ugcccacuccaauucauccu

SEQ ID NO: 334 - RNA, 20 nt, Artificial Sequence
  targeting sequence with ATCN PAM
uccauguggcaccgaguggu

SEQ ID NO: 335 - RNA, 20 nt, Artificial Sequence
  targeting sequence with ATCN PAM
uuacagagcacccaccuacc

SEQ ID NO: 336 - RNA, 20 nt, Artificial Sequence
  targeting sequence with ATCN PAM
aggcugagguagucucagau

SEQ ID NO: 337 - RNA, 20 nt, Artificial Sequence
  targeting sequence with ATCN PAM
gagacuaccucagccuggau

SEQ ID NO: 338 - RNA, 20 nt, Artificial Sequence
  targeting sequence with ATCN PAM
ccaucugagacuaccucagc

SEQ ID NO: 339 - RNA, 20 nt, Artificial Sequence
  targeting sequence with ATCN PAM
cuaaggcaggggcaaaaugc

SEQ ID NO: 340 - RNA, 20 nt, Artificial Sequence
  targeting sequence with ATCN PAM
agcugcaaauuuucugaacu

SEQ ID NO: 341 - RNA, 20 nt, Artificial Sequence
  targeting sequence with ATCN PAM
ccuuucacuccaugucucac

SEQ ID NO: 342 - RNA, 20 nt, Artificial Sequence
  targeting sequence with ATCN PAM
uuuuggagcuuuaagauuug

SEQ ID NO: 343 - RNA, 20 nt, Artificial Sequence
  targeting sequence with ATCN PAM
uaaagcuccaaaaugaucuc

SEQ ID NO: 344 - RNA, 20 nt, Artificial Sequence
  targeting sequence with ATCN PAM
agcagggcagucaaaucuua

SEQ ID NO: 345 - RNA, 20 nt, Artificial Sequence
  targeting sequence with ATCN PAM
guuugaaauuauauauuuau

SEQ ID NO: 346 - RNA, 20 nt, Artificial Sequence
  targeting sequence with ATCN PAM
uauaaauauauaauuucaaa

SEQ ID NO: 347 - RNA, 20 nt, Artificial Sequence
  targeting sequence with ATCN PAM
uggccaggcacaguggcgca

SEQ ID NO: 348 - RNA, 20 nt, Artificial Sequence
  targeting sequence with ATCN PAM
caauacuuugggagguugag

SEQ ID NO: 349 - RNA, 20 nt, Artificial Sequence
  targeting sequence with ATCN PAM
acccaccucaaccucccaaa

SEQ ID NO: 350 - RNA, 20 nt, Artificial Sequence
  targeting sequence with ATCN PAM
cuugagcccaggaguuugag

SEQ ID NO: 351 - RNA, 20 nt, Artificial Sequence
  targeting sequence with ATCN PAM
guacaaaaaaaaaaaugcaa

SEQ ID NO: 352 - RNA, 20 nt, Artificial Sequence
  targeting sequence with ATCN PAM
uccuauuccacuaauaaaag

SEQ ID NO: 353 - RNA, 20 nt, Artificial Sequence
  targeting sequence with ATCN PAM
uaguaaacuuaucuuccuau

SEQ ID NO: 354 - RNA, 20 nt, Artificial Sequence
  targeting sequence with ATCN PAM
auucagacggauuucaccaa

SEQ ID NO: 355 - RNA, 20 nt, Artificial Sequence
  targeting sequence with ATCN PAM
gucugaauugauuuaauccu

SEQ ID NO: 356 - RNA, 20 nt, Artificial Sequence
  targeting sequence with ATCN PAM
caaaggccgggcgugguagc

SEQ ID NO: 357 - RNA, 20 nt, Artificial Sequence
  targeting sequence with ATCN PAM
aucccaaaggccgggcgugg

SEQ ID NO: 358 - RNA, 20 nt, Artificial Sequence
  targeting sequence with ATCN PAM
uagggugguugggaggucug

SEQ ID NO: 359 - RNA, 20 nt, Artificial Sequence
  targeting sequence with ATCN PAM
auuuccucuucuaaauuggg

SEQ ID NO: 360 - RNA, 20 nt, Artificial Sequence
  targeting sequence with ATCN PAM
uucucuauugcccaggcugg

SEQ ID NO: 361 - RNA, 20 nt, Artificial Sequence
  targeting sequence with ATCN PAM
uugccugcuuucauuuugcc

SEQ ID NO: 362 - RNA, 20 nt, Artificial Sequence
  targeting sequence with ATCN PAM
cucccugccaaguacuccuu

SEQ ID NO: 363 - RNA, 20 nt, Artificial Sequence
  targeting sequence with ATCN PAM
ccacauaaccuggagcagcu

SEQ ID NO: 364 - RNA, 20 nt, Artificial Sequence
  targeting sequence with ATCN PAM
cucccgcagccugggaaaca

SEQ ID NO: 365 - RNA, 20 nt, Artificial Sequence
  targeting sequence with ATCN PAM
uacccuguuucccaggcugc

SEQ ID NO: 366 - RNA, 20 nt, Artificial Sequence
  targeting sequence with ATCN PAM
uuaaaaacucugacgccgaa

SEQ ID NO: 367 - RNA, 20 nt, Artificial Sequence
  targeting sequence with ATCN PAM
caccaaccagcacuccccac

SEQ ID NO: 368 - RNA, 20 nt, Artificial Sequence
  targeting sequence with ATCN PAM
cacccagaaacagaaaacag

SEQ ID NO: 369 - RNA, 20 nt, Artificial Sequence
  targeting sequence with ATCN PAM
ggcucaaccaguucugccau

SEQ ID NO: 370 - RNA, 20 nt, Artificial Sequence
  targeting sequence with ATCN PAM
gcugacaccacccagacugg

SEQ ID NO: 371 - RNA, 20 nt, Artificial Sequence
  targeting sequence with ATCN PAM
aucgagugcagggucugcaa

SEQ ID NO: 372 - RNA, 20 nt, Artificial Sequence
  targeting sequence with ATCN PAM
agugcagggucugcaaaaua

SEQ ID NO: 373 - RNA, 20 nt, Artificial Sequence
  targeting sequence with ATCN PAM
ugugacuuagaaugccuaac

SEQ ID NO: 374 - RNA, 20 nt, Artificial Sequence
  targeting sequence with ATCN PAM
cauccugugacuuagaaugc

SEQ ID NO: 375 - RNA, 20 nt, Artificial Sequence
  targeting sequence with ATCN PAM
ugugccgaccucguaucuca

SEQ ID NO: 376 - RNA, 20 nt, Artificial Sequence
  targeting sequence with ATCN PAM
acccuuuguuuagcauuuca

SEQ ID NO: 377 - RNA, 20 nt, Artificial Sequence
  targeting sequence with ATCN PAM
agaaauaacuauaaaaaugg

SEQ ID NO: 378 - RNA, 20 nt, Artificial Sequence
  targeting sequence with ATCN PAM
uguucugucuuggagagcug

SEQ ID NO: 379 - RNA, 20 nt, Artificial Sequence
  targeting sequence with ATCN PAM
uggccagguauccuguucug

SEQ ID NO: 380 - RNA, 20 nt, Artificial Sequence
  targeting sequence with ATCN PAM
guuaacaccuuggcauuagg

SEQ ID NO: 381 - RNA, 20 nt, Artificial Sequence
  targeting sequence with ATCN PAM
cuacuuagagggcaaaguaa

SEQ ID NO: 382 - RNA, 20 nt, Artificial Sequence
  targeting sequence with ATCN PAM
ugcugccuuauuaauguuug

SEQ ID NO: 383 - RNA, 20 nt, Artificial Sequence
  targeting sequence with ATCN PAM
cugaagcacuuuacauaugu

SEQ ID NO: 384 - RNA, 20 nt, Artificial Sequence
  targeting sequence with ATCN PAM
uagucaggucuugaagagug

SEQ ID NO: 385 - RNA, 20 nt, Artificial Sequence
  targeting sequence with ATCN PAM
agagaacucuuauucacucu

SEQ ID NO: 386 - RNA, 20 nt, Artificial Sequence
  targeting sequence with ATCN PAM
acagaugcuuuuggauuugc

SEQ ID NO: 387 - RNA, 20 nt, Artificial Sequence
  targeting sequence with ATCN PAM
guagaugaaguuagcaaguu

SEQ ID NO: 388 - RNA, 20 nt, Artificial Sequence
  targeting sequence with ATCN PAM
aaaagcaucuguagaugaag

SEQ ID NO: 389 - RNA, 20 nt, Artificial Sequence
  targeting sequence with ATCN PAM
ugugcaaauaaucacagucc

SEQ ID NO: 390 - RNA, 20 nt, Artificial Sequence
  targeting sequence with ATCN PAM
caguccuauuucuuccuguu

SEQ ID NO: 391 - RNA, 20 nt, Artificial Sequence
  targeting sequence with ATCN PAM
augccaguggacauccuugu

SEQ ID NO: 392 - RNA, 20 nt, Artificial Sequence
  targeting sequence with ATCN PAM
uugucucuuuccucaucuca

SEQ ID NO: 393 - RNA, 20 nt, Artificial Sequence
  targeting sequence with ATCN PAM
cagugggaaaacuuucaaua

SEQ ID NO: 394 - RNA, 20 nt, Artificial Sequence
  targeting sequence with ATCN PAM
ccgacuuuuagcauccuuau

SEQ ID NO: 395 - RNA, 20 nt, Artificial Sequence
  targeting sequence with ATCN PAM
aauagcuuggaaccuuagcc

SEQ ID NO: 396 - RNA, 20 nt, Artificial Sequence
  targeting sequence with ATCN PAM
uuguuuguguguguaucuac

SEQ ID NO: 397 - RNA, 20 nt, Artificial Sequence
  targeting sequence with ATCN PAM
acaugucuuuguauugcugu

SEQ ID NO: 398 - RNA, 20 nt, Artificial Sequence
  targeting sequence with ATCN PAM
uugaagaagaacuuucccau

SEQ ID NO: 399 - RNA, 20 nt, Artificial Sequence
  targeting sequence with ATCN PAM
ccaaauaaggaauggcaugc

SEQ ID NO: 400 - RNA, 20 nt, Artificial Sequence
  targeting sequence with ATCN PAM
cuagauaacuuccuuuucuu

SEQ ID NO: 401 - RNA, 20 nt, Artificial Sequence
  targeting sequence with ATCN PAM
agggauaguuaaggaagaau

SEQ ID NO: 402 - RNA, 20 nt, Artificial Sequence
  targeting sequence with ATCN PAM
gguaaaguguaaagugugag

SEQ ID NO: 403 - RNA, 20 nt, Artificial Sequence
  targeting sequence with ATCN PAM
ugggacccccaaaauuacua

SEQ ID NO: 404 - RNA, 20 nt, Artificial Sequence
  targeting sequence with ATCN PAM
ucccuucagccuaguaauuu

SEQ ID NO: 405 - RNA, 20 nt, Artificial Sequence
  targeting sequence with ATCN PAM
uagugagacuuugaauagaa

SEQ ID NO: 406 - RNA, 20 nt, Artificial Sequence
  targeting sequence with ATCN PAM
aacugccuccuuuggaaagg

SEQ ID NO: 407 - RNA, 20 nt, Artificial Sequence
  targeting sequence with ATCN PAM
cauucaguacucaauucuuu

SEQ ID NO: 408 - RNA, 20 nt, Artificial Sequence
  targeting sequence with ATCN PAM
auaaaugcccauaucuaaua

SEQ ID NO: 409 - RNA, 20 nt, Artificial Sequence
  targeting sequence with ATCN PAM
aauaguucaggauuucuugc

SEQ ID NO: 410 - RNA, 20 nt, Artificial Sequence
  targeting sequence with ATCN PAM
ugaacuauuagauaugggca

SEQ ID NO: 411 - RNA, 20 nt, Artificial Sequence
  targeting sequence with ATCN PAM
uaguuaacacauaauucugu

SEQ ID NO: 412 - RNA, 20 nt, Artificial Sequence
  targeting sequence with ATCN PAM
aaaaguuaguucaaauuaca

SEQ ID NO: 413 - RNA, 20 nt, Artificial Sequence
  targeting sequence with ATCN PAM
guaauuugaacuaacuuuug

SEQ ID NO: 414 - RNA, 20 nt, Artificial Sequence
  targeting sequence with ATCN PAM
aaacuuuuuccacauuuuuc

SEQ ID NO: 415 - RNA, 20 nt, Artificial Sequence
  targeting sequence with ATCN PAM
gguuuuaaagaauauuuuau

SEQ ID NO: 416 - RNA, 20 nt, Artificial Sequence
  targeting sequence with ATCN PAM
agacuaagagcuuuaacuac

SEQ ID NO: 417 - RNA, 20 nt, Artificial Sequence
  targeting sequence with ATCN PAM
uuucuacuuaauuuacugug

SEQ ID NO: 418 - RNA, 20 nt, Artificial Sequence
  targeting sequence with ATCN PAM
aguuuucauuuguuugcugu

SEQ ID NO: 419 - RNA, 20 nt, Artificial Sequence
  targeting sequence with ATCN PAM
agcagagaauaaacagcaaa

SEQ ID NO: 420 - RNA, 20 nt, Artificial Sequence
  targeting sequence with ATCN PAM
uggccaggcugguuuugaac

SEQ ID NO: 421 - RNA, 20 nt, Artificial Sequence
  targeting sequence with ATCN PAM
ucuuggccaggcugguuuug

SEQ ID NO: 422 - RNA, 20 nt, Artificial Sequence
  targeting sequence with ATCN PAM
cagcuacuugggaggcugag

SEQ ID NO: 423 - RNA, 20 nt, Artificial Sequence
  targeting sequence with ATCN PAM
aaaaaguuaguuuaagguua

SEQ ID NO: 424 - RNA, 20 nt, Artificial Sequence
  targeting sequence with ATCN PAM
agaacccuaaaaucuaaaaa

SEQ ID NO: 425 - RNA, 20 nt, Artificial Sequence
  targeting sequence with ATCN PAM
uuauuucccaagaauuacuc

SEQ ID NO: 426 - RNA, 20 nt, Artificial Sequence
  targeting sequence with ATCN PAM
ucuuuauuucccaagaauua

SEQ ID NO: 427 - RNA, 20 nt, Artificial Sequence
  targeting sequence with ATCN PAM
uuaaaaucaucuuuauuucc

SEQ ID NO: 428 - RNA, 20 nt, Artificial Sequence
  targeting sequence with ATCN PAM
accagaaaauaugcauugau

SEQ ID NO: 429 - RNA, 20 nt, Artificial Sequence
  targeting sequence with ATCN PAM
gcccucuugcaugggaaagc

SEQ ID NO: 430 - RNA, 20 nt, Artificial Sequence
  targeting sequence with ATCN PAM
gcuguuauaacaucagcccu

SEQ ID NO: 431 - RNA, 20 nt, Artificial Sequence
  targeting sequence with ATCN PAM
uuaugcuacaguguguuuuc

SEQ ID NO: 432 - RNA, 20 nt, Artificial Sequence
  targeting sequence with ATCN PAM
acuacaacugaauuucuaua

SEQ ID NO: 433 - RNA, 20 nt, Artificial Sequence
  targeting sequence with ATCN PAM
aagguugacuuaaagaagca

SEQ ID NO: 434 - RNA, 20 nt, Artificial Sequence
  targeting sequence with ATCN PAM
auuugguuuuaggagguuug

SEQ ID NO: 435 - RNA, 20 nt, Artificial Sequence
  targeting sequence with ATCN PAM
ucccaauaguaauaauaaua

SEQ ID NO: 436 - RNA, 20 nt, Artificial Sequence
  targeting sequence with ATCN PAM
guguuuccuuaaagucuuag

SEQ ID NO: 437 - DNA, 3120 bp, Artificial Sequence
  Stx2 plasmid sequence
atggctccgaagaagaagcgaaaggtcagccaggaaattaaacgcatcaacaagatccgccgtcgtctggtaaaagacagcaatacgaaaaaagccggaaaaaccggtccgatgaaaacgctgctggtgcgcgtgatgacgccggatctccgcgaacgtcttgagaatttgcgtaagaaacctgaaaatattccgcaaccgatttctaacacctcgcgcgccaatctgaataaactgctgaccgattacaccgaaatgaagaaagcgattctgcacgtttactgggaagagttccagaaagacccggtcggtctgatgagccgcgttgcgcaacctgcgccgaaaaatatcgatcagcgcaagttaatcccggttaaagatggtaatgaacgtttaacctccagcggctttgcctgcagtcagtgctgccagccactttatgtttataaacttgaacaggttaacgataaagggaaaccccataccaattatttcggccgctgcaatgtcagcgaacatgaacgcctgattttgttaagcccgcataaaccggaagcgaatgacgaactggtgacctattccctgggtaaatttggtcagcgggcgctggatttttacagcattcatgtgacgcgggaaagtaaccatccggtaaagccactggaacaaatcggcggtaacagctgcgcctctggcccggttggcaaagcgcttagcgatgcctgtatgggcgcggtggcgagctttctgacaaaataccaggatattatcctggagcatcagaaggtgatcaaaaagaacgagaaacgtctggcaaatttaaaggatattgcctccgctaacggcctggcgttcccgaagattaccttaccgccgcagccgcacaccaaagaaggtatcgaagcgtataacaacgttgttgcccagatcgtcatctgggtgaatctcaacctgtggcaaaaactgaaaattggtcgtgatgaagcaaaaccgttgcagcgactgaaaggattcccgtcgtttccgctggttgaacgacaggcgaacgaagtggattggtgggatatggtttgtaacgtcaaaaaattgatcaacgaaaaaaaggaagatggcaaagttttctggcaaaatctggcgggttacaaacgtcaggaggcgttgcttccgtatctctcttcagaagaagatcgcaaaaaaggcaagaagtttgctcgctatcagtttggcgatttattactgcatctggaaaaaaaacacggcgaagactggggcaaagtgtacgatgaagcctgggagcgtatcgacaaaaaagtggaaggtttgtcgaaacatattaaactcgaagaagagcgccgcagtgaagatgcgcagtcaaaagcagcgctgacggactggttacgtgcgaaagccagttttgtgattgaaggattaaaagaagctgataaagatgaattttgccgttgcgaactgaaactgcaaaaatggtatggcgacctgcgcggcaaaccgttcgccattgaggcagaaaatagcatccttgatatctccggtttcagcaaacaatataactgcgcgtttatttggcagaaagacggcgtgaaaaagcttaacctgtatctgatcattaactattttaaaggcgggaaactgcgtttcaagaaaatcaagccggaagcatttgaagccaatcgtttttataccgttattaataaaaaaagcggtgaaatcgtgccgatggaagttaattttaactttgatgatccgaacttgattattctgccgctggcattcggtaaacggcagggccgtgagtttatctggaacgacctgttatcgctggaaacgggcagcctgaaattagccaacggtcgcgtcattgaaaaaacgctctacaaccgccgcacccgccaggatgagccggcactgtttgtcgcgctgacctttgaacggcgtgaagtcctcgatagcagcaacatcaaaccaatgaaccttatcggtattgatcgtggtgaaaacattcctgccgttatcgccctgactgatccagaaggctgcccgctttctcgcttcaaagattcactgggcaacccgacccatatcctccgtattggcgagagctacaaagagaaacagcgtaccattcaggcagccaaagaagtggagcagcgtcgcgcgggcggctatagccgtaaatatgccagcaaagctaaaaacctggcggatgacatggtgcgtaacacggcgcgcgatttgctgtactacgccgtcacccaggacgcgatgctgatttttgagaacctctcccgcggttttgggcgtcagggtaaacgcacgtttatggcggaacgccagtatacgcgtatggaggactggctgaccgcgaagctggcctatgaaggcttgccgtctaaaacttacctgagcaagaccctggctcagtacaccagtaaaacctgtagtaattgcggctttaccatcaccagcgccgattatgaccgcgtgctggaaaagctgaagaaaaccgccaccggctggatgaccaccatcaatggtaaagagcttaaagtcgaagggcagattacttattacaaccgttataagcggcaaaacgtggtgaaagatctgtcggttgagctggaccgtttgtctgaagaaagcgtgaacaatgatatcagctcctggaccaaaggtcgttccggcgaagcgttaagtctgttgaaaaagcgctttagccatcgcccggtgcaggaaaaattcgtttgcctgaactgtggcttcgaaacccacgccgacgagcaagcggcgctcaatattgcgcgtagctggctgttcctgcgcagccaggaatataaaaaatatcaaaccaacaaaacaactggcaataccgacaagcgtgcctttgttgaaacctggcagagcttctatcgcaaaaaactgaaagaggtctggaaaccggcggtagcgccaaagaaaaaacgcaaagtgagcgaaaatctttattttcaaggtagcgcatggagtcatcctcaattcgagaaaggtggaggttctggcggtggatcgggaggttcagcgtggagccacccgcagttcgaaaaaggaaggggatccggctgctaa

SEQ ID NO: 438 - DNA, 2928 bp, Artificial Sequence
  CasX 119 Variant
caagagatcaagagaatcaacaagatcagaaggagactggtcaaggacagcaacacaaagaaggccggcaagacaggccccatgaaaaccctgctcgtcagagtgatgacccctgacctgagagagcggctggaaaacctgagaaagaagcccgagaacatccctcagcctatcagcaacaccagcagggccaacctgaacaagctgctgaccgactacaccgagatgaagaaagccatcctgcacgtgtactgggaagagttccagaaagaccccgtgggcctgatgagcagagttgctcagcccgctcctaagaacatcgaccagagaaagctgatccccgtgaaggacggcaacgagagactgacctctagcggctttgcctgcagccagtgttgccagcctctgtacgtgtacaagctggaacaagtgaacgacaagggcaagccccacaccaactacttcggcagatgcaacgtgtccgagcacgagaggctgatcctgctgtctcctcacaagcccgaggccaacgatgagctggtcacatacagcctgggcaagttcggacagagagccctggacttctacagcatccacgtgaccagggagagcaatcaccctgtgaagcccctggaacagatcggcggcaatagctgtgcctctggacctgtgggaaaagccctgagcgacgcctgtatgggagccgtggcatccttcctgaccaagtaccaggacatcatcctggaacaccagaaagtgatcaagaagaacgagaaaagactggccaacctcaaggatatcgccagcgctaacggcctggcctttcctaagatcaccctgcctccacagcctcacaccaaagagggcatcgaggcctacaacaacgtggtggcccagatcgtgatttgggtcaacctgaatctgtggcagaagctgaagatcggcagggacgaagccaagccactgcagagactgaagggcttccctagcttccctctggtggaaagacaggccaatgaagtggattggtgggacatggtctgcaacgtgaagaagctgatcaacgagaagaaagaggatggcaaggttttctggcagaacctggccggctacaagagacaagaagccctgaggccttacctgagcagcgaagaggaccggaagaagggcaagaagttcgccagataccagttcggcgacctgctgctgcacctggaaaagaagcacggcgaggactggggcaaagtgtacgatgaggcctgggagagaatcgacaagaaggtggaaggcctgagcaagcacattaagctggaagaggaaagaaggagcgaggacgcccaatctaaagccgctctgaccgattggctgagagccaaggccagctttgtgatcgagggcctgaaagaggccgacaaggacgagttctgcagatgcgagctgaagctgcagaagtggtacggcgatctgagaggcaagcccttcgccattgaggccgagaacagcatcctggacatcagcggcttcagcaagcagtacaactgcgccttcatttggcagaaagacggcgtcaagaaactgaacctgtacctgatcatcaattacttcaaaggcggcaagctgcggttcaagaagatcaaacccgaggccttcgaggctaacagattctacaccgtgatcaacaaaaagtccggcgagatcgtgcccatggaagtgaacttcaacttcgacgaccccaacctgattatcctgcctctggccttcggcaagagacagggcagagagttcatctggaacgatctgctgagcctggaaaccggctctctgaagctggccaatggcagagtgatcgagaaaaccctgtacaacaggagaaccagacaggacgagcctgctctgtttgtggccctgaccttcgagagaagagaggtgctggacagcagcaacatcaagcccatgaacctgatcggcatcgaccggggcgagaatatccctgctgtgatcgccctgacagaccctgaaggatgcccactgagcagattcaaggactccctgggcaaccctacacacatcctgagaatcggcgagagctacaaagagaagcagaggacaatccaggccaagaaagaggtggaacagagaagagccggcggatactctaggaagtacgccagcaaggccaagaatctggccgacgacatggtccgaaacaccgccagagatctgctgtactacgccgtgacacaggacgccatgctgatcttcgagaatctgagcagaggcttcggccggcagggcaagagaacctttatggccgagaggcagtacaccagaatggaagattggctcacagctaaactggcctacgagggactgagcaagacctacctgtccaaaacactggcccagtatacctccaagacctgcagcaattgcggcttcaccatcaccagcgccgactacgacagagtgctggaaaagctcaagaaaaccgccaccggctggatgaccaccatcaacggcaaagagctgaaggttgagggccagatcacctactacaacaggtacaagaggcagaacgtcgtgaaggatctgagcgtggaactggacagactgagcgaagagagcgtgaacaacgacatcagcagctggacaaagggcagatcaggcgaggctctgagcctgctgaagaagaggtttagccacagacctgtgcaagagaagttcgtgtgcctgaactgcggcttcgagacacacgccgatgaacaggctgccctgaacattgccagaagctggctgttcctgagaagccaagagtacaagaagtaccagaccaacaagaccaccggcaacaccgacaagagggcctttgtggaaacctggcagagcttctacagaaaaaagctgaaagaagtctggaagcccgccgtg

SEQ ID NO: 439 - protein, 976 aa, Artificial Sequence; identical to SEQ ID NO: 117
  CasX 119 Variant

SEQ ID NO: 440 - DNA, 2928 bp, Artificial Sequence
  CasX 457 Variant
caagagatcaagagaatcaacaagatcagaaggagactggtcaaggacagcaacacaaagaaggccggcaagacaggccccatgaaaaccctgctcgtcagagtgatgacccctgacctgagagagcggctggaaaacctgagaaagaagcccgagaacatccctcagcctatcagcaacaccagcagggccaacctgaacaagctgctgaccgactacaccgagatgaagaaagccatcctgcacgtgtactgggaagagttccagaaagaccccgtgggcctgatgagcagagttgctcagcccgctcctaagaacatcgaccagagaaagctgatccccgtgaaggacggcaacgagagactgacctctagcggctttgcctgcagccagtgttgccagcctctgtacgtgtacaagctggaacaagtgaacgacaagggcaagccccacaccaactacttcggcagatgcaacgtgtccgagcacgagaggctgatcctgctgtctcctcacaagcccgaggccaacgatgagctggtcacatacagcctgggcaagttcggacagagagccctggacttctacagcatccacgtgaccagggagagcaatcaccctgtgaagcccctggaacagatcggcggcaatagctgtgcctctggacctgtgggaaaagccctgagcgacgcctgtatgggagccgtggcatccttcctgaccaagtaccaggacatcatcctggaacacaagaaagtgatcaagaagaacgagaaaagactggccaacctcaaggatatcgccagcgctaacggcctggcctttcctaagatcaccctgcctccacagcctcacaccaaagagggcatcgaggcctacaacaacgtggtggcccagatcgtgatttgggtcaacctgaatctgtggcagaagctgaagatcggcagggacgaagccaagccactgcagagactgaagggcttccctagcttccctctggtggaaagacaggccaatgaagtggattggtgggacatggtctgcaacgtgaagaagctgatcaacgagaagaaagaggatggcaaggttttctggcagaacctggccggctacaagagacaagaagccctgaggccttacctgagcagccccgaggaccggaagaagggcaagaagttcgccagataccagctgggcgacctgctgctgcacctggaaaagaagcacggcgaggactggggcaaagtgtacgatgaggcctgggagagaatcgacaagaaggtggaaggcctgagcaagcacattaagctggaagaggaaagaaggagcgaggacgcccaatctaaagccgctctgaccgattggctgagagccaaggccagctttgtgatcgagggcctgaaagaggccgacaaggacgagttctgcagatgcgagctgaagctgcagaagtggtacggcgatctgagaggcaagcccttcgccattgaggccgagaacagcatcctggacatcagcggcttcagcaagcagtacaactgcgccttcatttggcagaaagacggcgtcaagaaactgaacctgtacctgatcatcaattacttcaaaggcggcaagctgcggttcaagaagatcaaacccgaggccttcgaggctaacagattctacaccgtgatcaacaaaaagtccggcgagatcgtgcccatggaagtgaacttcaacttcgacgaccccaacctgattatcctgcctctggccttcggcaagagacagggcagagagttcatctggaacgatctgctgagcctggaaaccggctctctgaagctggccaatggcagagtgatcgagaaacccctgtacaacaggagaaccagacaggacgagcctgctctgtttgtggccctgaccttcgagagaagagaggtgctggacagcagcaacatcaagcccatgaacctgatcggcgtggaccggggcgagaatatccctgctgtgatcgccctgacagaccctgaaggatgcccactgagcagattcaaggactccctgggcaaccctacacacatcctgagaatcggcgagagctacaaagagaagcagaggacaatccaggccaagaaagaggtggaacagagaagagccggcggatactctaggaagtacgccagcaaggccaagaatctggccgacgacatggtccgaaacaccgccagagatctgctgtactacgccgtgacacaggacgccatgctgatcttcgagaatctgagcagaggcttcggccggcagggcaagagaacctttatggccgagaggcagtacaccagaatggaagattggctcacagctaaactggcctacgagggactgagcaagacctacctgtccaaaacactggcccagtatacctccaagacctgcagcaattgcggcttcaccatcaccagcgccgactacgacagagtgctggaaaagctcaagaaaaccgccaccggctggatgaccaccatcaacggcaaagagctgaaggttgagggccagatcacctactacaacaggaggaagaggcagaacgtcgtgaaggatctgagcgtggaactggacagactgagcgaagagagcgtgaacaacgacatcagcagctggacaaagggcagatcaggcgaggctctgagcctgctgaagaagaggtttagccacagacctgtgcaagagaagttcgtgtgcctgaactgcggcttcgagacacacgccgatgaacaggctgccctgaacattgccagaagctggctgttcctgagaagccaagagtacaagaagtaccagaccaacaagaccaccggcaacaccgacaagagggcctttgtggaaacctggcagagcttctacagaaaaaagctgaaagaagtctggaagcccgccgtg

SEQ ID NO: 441 - protein, 976 aa, Artificial Sequence
  CasX 457 Variant
QEIKRINKIRRRLVKDSNTKKAGKTGPMKTLLVRVMTPDLRERLENLRKKPENIPQPISNTSRANLNKLLTDYTEMKKAILHVYWEEFQKDPVGLMSRVAQPAPKNIDQRKLIPVKDGNERLTSSGFACSQCCQPLYVYKLEQVNDKGKPHTNYFGRCNVSEHERLILLSPHKPEANDELVTYSLGKFGQRALDFYSIHVTRESNHPVKPLEQIGGNSCASGPVGKALSDACMGAVASFLTKYQDIILEHKKVIKKNEKRLANLKDIASANGLAFPKITLPPQPHTKEGIEAYNNVVAQIVIWVNLNLWQKLKIGRDEAKPLQRLKGFPSFPLVERQANEVDWWDMVCNVKKLINEKKEDGKVFWQNLAGYKRQEALRPYLSSPEDRKKGKKFARYQLGDLLLHLEKKHGEDWGKVYDEAWERIDKKVEGLSKHIKLEEERRSEDAQSKAALTDWLRAKASFVIEGLKEADKDEFCRCELKLQKWYGDLRGKPFAIEAENSILDISGFSKQYNCAFIWQKDGVKKLNLYLIINYFKGGKLRFKKIKPEAFEANRFYTVINKKSGEIVPMEVNFNFDDPNLIILPLAFGKRQGREFIWNDLLSLETGSLKLANGRVIEKPLYNRRTRQDEPALFVALTFERREVLDSSNIKPMNLIGVDRGENIPAVIALTDPEGCPLSRFKDSLGNPTHILRIGESYKEKQRTIQAKKEVEQRRAGGYSRKYASKAKNLADDMVRNTARDLLYYAVTQDAMLIFENLSRGFGRQGKRTFMAERQYTRMEDWLTAKLAYEGLSKTYLSKTLAQYTSKTCSNCGFTITSADYDRVLEKLKKTATGWMTTINGKELKVEGQITYYNRRKRQNVVKDLSVELDRLSEESVNNDISSWTKGRSGEALSLLKKRFSHRPVQEKFVCLNCGFETHADEQAALNIARSWLFLRSQEYKKYQTNKTTGNTDKRAFVETWQSFYRKKLKEVWKPAV

SEQ ID NO: 442 - DNA, 2928 bp, Artificial Sequence
  CasX 438 Variant
caagagatcaagagaatcaacaagatcagaaggagactggtcaaggacagcaacacaaagaaggccggcaagacaggccccatgaaaaccctgctcgtcagagtgatgacccctgacctgagagagcggctggaaaacctgagaaagaagcccgagaacatccctcagcctatcagcaacaccagcagggccaacctgaacaagctgctgaccgactacaccgagatgaagaaagccatcctgcacgtgtactgggaagagttccagaaagaccccgtgggcctgatgagcagagttgctcagcccgctcctaagaacatcgaccagagaaagctgatccccgtgaaggacggcaacgagagactgacctctagcggctttgcctgcagccagtgttgccagcctctgtacgtgtacaagctggaacaagtgaacgacaagggcaagccccacaccaactacttcggcagatgcaacgtgtccgagcacgagaggctgatcctgctgtctcctcacaagcccgaggccaacgatgagctggtcacatacagcctgggcaagttcggacagagagccctggacttctacagcatccacgtgaccagggagagcaatcaccctgtgaagcccctggaacagatcggcggcaatagctgtgcctctggacctgtgggaaaagccctgagcgacgcctgtatgggagccgtggcatccttcctgaccaagtaccaggacatcatcctggaacaccagaaagtgatcaagaagaacgagaaaagactggccaacctcaaggatatcgccagcgctaacggcctggcctttcctaagatcaccctgcctccacagcctcacaccaaagagggcatcgaggcctacaacaacgtggtggcccagatcgtgatttgggtcaacctgaatctgtggcagaagctgaagatcggcagggacgaagccaagccactgcagagactgaagggcttccctagcttccctctggtggaaagacaggccaatgaagtggattggtgggacatggtctgcaacgtgaagaagctgatcaacgagaagaaagaggatggcaaggttttctggcagaacctggccggctacaagagacaagaagccctgaggccttacctgagcagcgaagaggaccggaagaagggcaagaagttcgccagataccagctgggcgacctgctgaagcacctggaaaagaagcacggcgaggactggggcaaagtgtacgatgaggcctgggagagaatcgacaagaaggtggaaggcctgagcaagcacattaagctggaagaggaaagaaggagcgaggacgcccaatctaaagccgctctgaccgattggctgagagccaaggccagctttgtgatcgagggcctgaaagaggccgacaaggacgagttctgcagatgcgagctgaagctgcagaagtggtacggcgatctgagaggcaagcccttcgccattgaggccgagaacagcatcctggacatcagcggcttcagcaagcagtacaactgcgccttcatttggcagaaagacggcgtcaagaaactgaacctgtacctgatcatcaattacttcaaaggcggcaagctgcggttcaagaagatcaaacccgaggccttcgaggctaacagattctacaccgtgatcaacaaaaagtccggcgagatcgtgcccatggaagtgaacttcaacttcgacgaccccaacctgattatcctgcctctggccttcggcaagagacagggcagagagttcatctggaacgatctgctgagcctggaaaccggctctctgaagctggccaatggcagagtgatcgagaaaaccctgtacaacaggagaaccagacaggacgagcctgctctgtttgtggccctgaccttcgagagaagagaggtgctggacagcagcaacatcaagcccatgaacctgatcggcgtggaccggggcgagaatatccctgctgtgatcgccctgacagaccctgaaggatgcccactgagcagattcaaggactccctgggcaaccctacacacatcctgagaatcggcgagagctacaaagagaagcagaggacaatccaggccaagaaagaggtggaacagagaagagccggcggatactctaggaagtacgccagcaaggccaagaatctggccgacgacatggtccgaaacaccgccagagatctgctgtactacgccgtgacacaggacgccatgctgatcttcgagaatctgagcagaggcttcggccggcagggcaagagaacctttatggccgagaggcagtacaccagaatggaagattggctcacagctaaactggcctacgagggactgagcaagacctacctgtccaaaacactggcccagtatacctccaagacctgcagcaattgcggcttcaccatcaccagcgccgactacgacagagtgctggaaaagctcaagaaaaccgccaccggctggatgaccaccatcaacggcaaagagctgaaggttgagggccagatcacctactacaacaggaggaagaggcagaacgtcgtgaaggatctgagcgtggaactggacagactgagcgaagagagcgtgaacaacgacatcagcagctggacaaagggcagatcaggcgaggctctgagcctgctgaagaagaggtttagccacagacctgtgcaagagaagttcgtgtgcctgaactgcggcttcgagacacacgccgatgaacaggctgccctgaacattgccagaagctggctgttcctgagaagccaagagtacaagaagtaccagaccaacaagaccaccggcaacaccgacaagagggcctttgtggaaacctggcagagcttctacagaaaaaagctgaaagaagtctggaagcccgccgtg

SEQ ID NO: 443 - protein, 976 aa, Artificial Sequence
  CasX 438 Variant
QEIKRINKIRRRLVKDSNTKKAGKTGPMKTLLVRVMTPDLRERLENLRKKPENIPQPISNTSRANLNKLLTDYTEMKKAILHVYWEEFQKDPVGLMSRVAQPAPKNIDQRKLIPVKDGNERLTSSGFACSQCCQPLYVYKLEQVNDKGKPHTNYFGRCNVSEHERLILLSPHKPEANDELVTYSLGKFGQRALDFYSIHVTRESNHPVKPLEQIGGNSCASGPVGKALSDACMGAVASFLTKYQDIILEHQKVIKKNEKRLANLKDIASANGLAFPKITLPPQPHTKEGIEAYNNVVAQIVIWVNLNLWQKLKIGRDEAKPLQRLKGFPSFPLVERQANEVDWWDMVCNVKKLINEKKEDGKVFWQNLAGYKRQEALRPYLSSEEDRKKGKKFARYQLGDLLKHLEKKHGEDWGKVYDEAWERIDKKVEGLSKHIKLEEERRSEDAQSKAALTDWLRAKASFVIEGLKEADKDEFCRCELKLQKWYGDLRGKPFAIEAENSILDISGFSKQYNCAFIWQKDGVKKLNLYLIINYFKGGKLRFKKIKPEAFEANRFYTVINKKSGEIVPMEVNFNFDDPNLIILPLAFGKRQGREFIWNDLLSLETGSLKLANGRVIEKTLYNRRTRQDEPALFVALTFERREVLDSSNIKPMNLIGVDRGENIPAVIALTDPEGCPLSRFKDSLGNPTHILRIGESYKEKQRTIQAKKEVEQRRAGGYSRKYASKAKNLADDMVRNTARDLLYYAVTQDAMLIFENLSRGFGRQGKRTFMAERQYTRMEDWLTAKLAYEGLSKTYLSKTLAQYTSKTCSNCGFTITSADYDRVLEKLKKTATGWMTTINGKELKVEGQITYYNRRKRQNVVKDLSVELDRLSEESVNNDISSWTKGRSGEALSLLKKRFSHRPVQEKFVCLNCGFETHADEQAALNIARSWLFLRSQEYKKYQTNKTTGNTDKRAFVETWQSFYRKKLKEVWKPAV

SEQ ID NO: 444 - DNA, 2931 bp, Artificial Sequence
  CasX variant 488
caagagatcaagagaatcaacaagatcagaaggagactggtcaaggacagcaacacaaagaaggccggcaagacaggccccatgaaaaccctgctcgtcagagtgatgacccctgacctgagagagcggctggaaaacctgagaaagaagcccgagaacatccctcagcctatcagcaacaccagcagggccaacctgaacaagctgctgaccgactacaccgagatgaagaaagccatcctgcacgtgtactgggaagagttccagaaagaccccgtgggcctgatgagcagagttgctcagcctgccagcaagaagatcgaccagaacaagctgaagcccgagatggacgagaagggcaatctgaccacagccggctttgcctgctctcagtgtggccagcctctgttcgtgtacaagctggaacaggtgtccgagaaaggcaaggcctacaccaactacttcggcagatgtaacgtggccgagcacgagaagctgattctgctggcccagctgaaacctgagaaggactctgatgaggccgtgacctacagcctgggcaagtttggacagagagccctggacttctacagcatccacgtgaccaaagaaagcacacaccccgtgaagcccctggctcagatcgccggcaatagatacgcctctggacctgtgggcaaagccctgtccgatgcctgcatgggaacaatcgccagcttcctgagcaagtaccaggacatcatcatcgagcaccagaaggtggtcaagggcaaccagaagagactggaaagcctgagggagctggccggcaaagagaacctggaataccccagcgtgaccctgcctcctcagcctcacacaaaagaaggcgtggacgcctacaacgaagtgatcgccagagtgagaatgtgggtcaacctgaacctgtggcagaagctgaaactgtccagggacgacgccaagcctctgctgagactgaagggcttccctagcttccctctggtggaaagacaggccaatgaagtggattggtgggacatggtctgcaacgtgaagaagctgatcaacgagaagaaagaggatggcaaggttttctggcagaacctggccggctacaagagacaagaagccctgaggccttacctgagcagcgaagaggaccggaagaagggcaagaagttcgccagataccagttcggcgacctgctgctgcacctggaaaagaagcacggcgaggactggggcaaagtgtacgatgaggcctgggagagaatcgacaagaaggtggaaggcctgagcaagcacattaagctggaagaggaaagaaggagcgaggacgcccaatctaaagccgctctgaccgattggctgagagccaaggccagctttgtgatcgagggcctgaaagaggccgacaaggacgagttctgcagatgcgagctgaagctgcagaagtggtacggcgatctgagaggcaagcccttcgccattgaggccgagaacagcatcctggacatcagcggcttcagcaagcagtacaactgcgccttcatttggcagaaagacggcgtcaagaaactgaacctgtacctgatcatcaattacttcaaaggcggcaagctgcggttcaagaagatcaaacccgaggccttcgaggctaacagattctacaccgtgatcaacaaaaagtccggcgagatcgtgcccatggaagtgaacttcaacttcgacgaccccaacctgattatcctgcctctggccttcggcaagagacagggcagagagttcatctggaacgatctgctgagcctggaaaccggctctctgaagctggccaatggcagagtgatcgagaaaaccctgtacaacaggagaaccagacaggacgagcctgctctgtttgtggccctgaccttcgagagaagagaggtgctggacagcagcaacatcaagcccatgaacctgatcggcatcgaccggggcgagaatatccctgctgtgatcgccctgacagaccctgaaggatgcccactgagcagattcaaggactccctgggcaaccctacacacatcctgagaatcggcgagagctacaaagagaagcagaggacaatccaggccaagaaagaggtggaacagagaagagccggcggatactctaggaagtacgccagcaaggccaagaatctggccgacgacatggtccgaaacaccgccagagatctgctgtactacgccgtgacacaggacgccatgctgatcttcgagaatctgagcagaggcttcggccggcagggcaagagaacctttatggccgagaggcagtacaccagaatggaagattggctcacagctaaactggcctacgagggactgagcaagacctacctgtccaaaacactggcccagtatacctccaagacctgcagcaattgcggcttcaccatcaccagcgccgactacgacagagtgctggaaaagctcaagaaaaccgccaccggctggatgaccaccatcaacggcaaagagctgaaggttgagggccagatcacctactacaacaggtacaagaggcagaacgtcgtgaaggatctgagcgtggaactggacagactgagcgaagagagcgtgaacaacgacatcagcagctggacaaagggcagatcaggcgaggctctgagcctgctgaagaagaggtttagccacagacctgtgcaagagaagttcgtgtgcctgaactgcggcttcgagacacacgccgatgaacaggctgccctgaacattgccagaagctggctgttcctgagaagccaagagtacaagaagtaccagaccaacaagaccaccggcaacaccgacaagagggcctttgtggaaacctggcagagcttctacagaaaaaagctgaaagaagtctggaagcccgccgtg

SEQ ID NO: 445 - protein, 977 aa, Artificial Sequence; identical to SEQ ID NO: 135
  CasX variant 488

SEQ ID NO: 446 - DNA, 2931 bp, Artificial Sequence
  CasX variant 491
caagagatcaagagaatcaacaagatcagaaggagactggtcaaggacagcaacacaaagaaggccggcaagacaggccccatgaaaaccctgctcgtcagagtgatgacccctgacctgagagagcggctggaaaacctgagaaagaagcccgagaacatccctcagcctatcagcaacaccagcagggccaacctgaacaagctgctgaccgactacaccgagatgaagaaagccatcctgcacgtgtactgggaagagttccagaaagaccccgtgggcctgatgagcagagttgctcagcctgccagcaagaagatcgaccagaacaagctgaagcccgagatggacgagaagggcaatctgaccacagccggctttgcctgctctcagtgtggccagcctctgttcgtgtacaagctggaacaggtgtccgagaaaggcaaggcctacaccaactacttcggcagatgtaacgtggccgagcacgagaagctgattctgctggcccagctgaaacctgagaaggactctgatgaggccgtgacctacagcctgggcaagtttggacagagagccctggacttctacagcatccacgtgaccaaagaaagcacacaccccgtgaagcccctggctcagatcgccggcaatagatacgcctctggacctgtgggcaaagccctgtccgatgcctgcatgggaacaatcgccagcttcctgagcaagtaccaggacatcatcatcgagcaccagaaggtggtcaagggcaaccagaagagactggaaagcctgagggagctggccggcaaagagaacctggaataccccagcgtgaccctgcctcctcagcctcacacaaaagaaggcgtggacgcctacaacgaagtgatcgccagagtgagaatgtgggtcaacctgaacctgtggcagaagctgaaactgtccagggacgacgccaagcctctgctgagactgaagggcttccctagcttccctctggtggaaagacaggccaatgaagtggattggtgggacatggtctgcaacgtgaagaagctgatcaacgagaagaaagaggatggcaaggttttctggcagaacctggccggctacaagagacaagaagccctgaggccttacctgagcagcgaagaggaccggaagaagggcaagaagttcgccagataccagctgggcgacctgctgctgcacctggaaaagaagcacggcgaggactggggcaaagtgtacgatgaggcctgggagagaatcgacaagaaggtggaaggcctgagcaagcacattaagctggaagaggaaagaaggagcgaggacgcccaatctaaagccgctctgaccgattggctgagagccaaggccagctttgtgatcgagggcctgaaagaggccgacaaggacgagttctgcagatgcgagctgaagctgcagaagtggtacggcgatctgagaggcaagcccttcgccattgaggccgagaacagcatcctggacatcagcggcttcagcaagcagtacaactgcgccttcatttggcagaaagacggcgtcaagaaactgaacctgtacctgatcatcaattacttcaaaggcggcaagctgcggttcaagaagatcaaacccgaggccttcgaggctaacagattctacaccgtgatcaacaaaaagtccggcgagatcgtgcccatggaagtgaacttcaacttcgacgaccccaacctgattatcctgcctctggccttcggcaagagacagggcagagagttcatctggaacgatctgctgagcctggaaaccggctctctgaagctggccaatggcagagtgatcgagaaaaccctgtacaacaggagaaccagacaggacgagcctgctctgtttgtggccctgaccttcgagagaagagaggtgctggacagcagcaacatcaagcccatgaacctgatcggcgtggaccggggcgagaatatccctgctgtgatcgccctgacagaccctgaaggatgcccactgagcagattcaaggactccctgggcaaccctacacacatcctgagaatcggcgagagctacaaagagaagcagaggacaatccaggccaagaaagaggtggaacagagaagagccggcggatactctaggaagtacgccagcaaggccaagaatctggccgacgacatggtccgaaacaccgccagagatctgctgtactacgccgtgacacaggacgccatgctgatcttcgagaatctgagcagaggcttcggccggcagggcaagagaacctttatggccgagaggcagtacaccagaatggaagattggctcacagctaaactggcctacgagggactgagcaagacctacctgtccaaaacactggcccagtatacctccaagacctgcagcaattgcggcttcaccatcaccagcgccgactacgacagagtgctggaaaagctcaagaaaaccgccaccggctggatgaccaccatcaacggcaaagagctgaaggttgagggccagatcacctactacaacaggtacaagaggcagaacgtcgtgaaggatctgagcgtggaactggacagactgagcgaagagagcgtgaacaacgacatcagcagctggacaaagggcagatcaggcgaggctctgagcctgctgaagaagaggtttagccacagacctgtgcaagagaagttcgtgtgcctgaactgcggcttcgagacacacgccgatgaacaggctgccctgaacattgccagaagctggctgttcctgagaagccaagagtacaagaagtaccagaccaacaagaccaccggcaacaccgacaagagggcctttgtggaaacctggcagagcttctacagaaaaaagctgaaagaagtctggaagcccgccgtg

SEQ ID NO: 447 - protein, 977 aa, Artificial Sequence; identical to SEQ ID NO: 138
  CasX variant 491

SEQ ID NO: 448 - protein, 987 aa, Artificial Sequence
  CasX Variant
MAPKKKRKVSRQEIKRINKIRRRLVKDSNTKKAGKTGPMKTLLVRVMTPDLRERLENLRKKPENIPQPISNTSRANLNKLLTDYTEMKKAILHVYWEEFQKDPVGLMSRVAQPAPKNIDQRKLIPVKDGNERLTSSGFACSQCCQPLYVYKLEQVNDKGKPHTNYFGRCNVSEHERLILLSPHKPEANDELVTYSLGKFGQRALDFYSIHVTRESNHPVKPLEQIGGNSCASGPVGKALSDACMGAVASFLTKYQDIILEHQKVIKKNEKRLANLKDIASANGLAFPKITLPPQPHTKEGIEAYNNVVAQIVIWVNLNLWQKLKIGRDEAKPLQRLKGFPSFPLVERQANEVDWWDMVCNVKKLINEKKEDGKVFWQNLAGYKRQEALRPYLSSEEDRKKGKKFARYQFGDLLLHLEKKHGEDWGKVYDEAWERIDKKVEGLSKHIKLEEERRSEDAQSKAALTDWLRAKASFVIEGLKEADKDEFCRCELKLQKWYGDLRGKPFAIEAENSILDISGFSKQYNCAFIWQKDGVKKLNLYLIINYFKGGKLRFKKIKPEAFEANRFYTVINKKSGEIVPMEVNFNFDDPNLIILPLAFGKRQGREFIWNDLLSLETGSLKLANGRVIEKTLYNRRTRQDEPALFVALTFERREVLDSSNIKPMNLIGIDRGENIPAVIALTDPEGCPLSRFKDSLGNPTHILRIGESYKEKQRTIQAKKEVEQRRAGGYSRKYASKAKNLADDMVRNTARDLLYYAVTQDAMLIFENLSRGFGRQGKRTFMAERQYTRMEDWLTAKLAYEGLSKTYLSKTLAQYTSKTCSNCGFTITSADYDRVLEKLKKTATGWMTTINGKELKVEGQITYYNRYKRQNVVKDLSVELDRLSEESVNNDISSWTKGRSGEALSLLKKRFSHRPVQEKFVCLNCGFETHADEQAALNIARSWLFLRSQEYKKYQTNKTTGNTDKRAFVETWQSFYRKKLKEVWKPAV

SEQ ID NO: 449 - protein, 986 aa, Artificial Sequence
  CasX Variant
MQEIKRINKIRRRLVKDSNTKKAGKTGPMKTLLVRVMTPDLRERLENLRKKPENIPQPISNTSRANLNKLLTDYTEMKKAILHVYWEEFQKDPVGLMSRVAQPAPKNIDQRKLIPVKDGNERLTSSGFACSQCCQPLYVYKLEQVNDKGKPHTNYFGRCNVSEHERLILLSPHKPEANDELVTYSLGKFGQRALDFYSIHVTRESNHPVKPLEQIGGNSCASGPVGKALSDACMGAVASFLTKYQDIILEHQKVIKKNEKRLANLKDIASANGLAFPKITLPPQPHTKEGIEAYNNVVAQIVIWVNLNLWQKLKIGRDEAKPLQRLKGFPSFPLVERQANEVDWWDMVCNVKKLINEKKEDGKVFWQNLAGYKRQEALRPYLSSEEDRKKGKKFARYQFGDLLLHLEKKHGEDWGKVYDEAWERIDKKVEGLSKHIKLEEERRSEDAQSKAALTDWLRAKASFVIEGLKEADKDEFCRCELKLQKWYGDLRGKPFAIEAENSILDISGFSKQYNCAFIWQKDGVKKLNLYLIINYFKGGKLRFKKIKPEAFEANRFYTVINKKSGEIVPMEVNFNFDDPNLIILPLAFGKRQGREFIWNDLLSLETGSLKLANGRVIEKTLYNRRTRQDEPALFVALTFERREVLDSSNIKPMNLIGIDRGENIPAVIALTDPEGCPLSRFKDSLGNPTHILRIGESYKEKQRTIQAKKEVEQRRAGGYSRKYASKAKNLADDMVRNTARDLLYYAVTQDAMLIFENLSRGFGRQGKRTFMAERQYTRMEDWLTAKLAYEGLSKTYLSKTLAQYTSKTCSNCGFTITSADYDRVLEKLKKTATGWMTTINGKELKVEGQITYYNRYKRQNVVKDLSVELDRLSEESVNNDISSWTKGRSGEALSLLKKRFSHRPVQEKFVCLNCGFETHADEQAALNIARSWLFLRSQEYKKYQTNKTTGNTDKRAFVETWQSFYRKKLKEVWKPAVTSPKKKRKV

SEQ ID NO: 450 - protein, 996 aa, Artificial Sequence
  CasX Variant
MQEIKRINKIRRRLVKDSNTKKAGKTGPMKTLLVRVMTPDLRERLENLRKKPENIPQPISNTSRANLNKLLTDYTEMKKAILHVYWEEFQKDPVGLMSRVAQPAPKNIDQRKLIPVKDGNERLTSSGFACSQCCQPLYVYKLEQVNDKGKPHTNYFGRCNVSEHERLILLSPHKPEANDELVTYSLGKFGQRALDFYSIHVTRESNHPVKPLEQIGGNSCASGPVGKALSDACMGAVASFLTKYQDIILEHQKVIKKNEKRLANLKDIASANGLAFPKITLPPQPHTKEGIEAYNNVVAQIVIWVNLNLWQKLKIGRDEAKPLQRLKGFPSFPLVERQANEVDWWDMVCNVKKLINEKKEDGKVFWQNLAGYKRQEALRPYLSSEEDRKKGKKFARYQFGDLLLHLEKKHGEDWGKVYDEAWERIDKKVEGLSKHIKLEEERRSEDAQSKAALTDWLRAKASFVIEGLKEADKDEFCRCELKLQKWYGDLRGKPFAIEAENSILDISGFSKQYNCAFIWQKDGVKKLNLYLIINYFKGGKLRFKKIKPEAFEANRFYTVINKKSGEIVPMEVNFNFDDPNLIILPLAFGKRQGREFIWNDLLSLETGSLKLANGRVIEKTLYNRRTRQDEPALFVALTFERREVLDSSNIKPMNLIGIDRGENIPAVIALTDPEGCPLSRFKDSLGNPTHILRIGESYKEKQRTIQAKKEVEQRRAGGYSRKYASKAKNLADDMVRNTARDLLYYAVTQDAMLIFENLSRGFGRQGKRTFMAERQYTRMEDWLTAKLAYEGLSKTYLSKTLAQYTSKTCSNCGFTITSADYDRVLEKLKKTATGWMTTINGKELKVEGQITYYNRYKRQNVVKDLSVELDRLSEESVNNDISSWTKGRSGEALSLLKKRFSHRPVQEKFVCLNCGFETHADEQAALNIARSWLFLRSQEYKKYQTNKTTGNTDKRAFVETWQSFYRKKLKEVWKPAVTSPKKKRKVPPPPKKKRKV

SEQ ID NO: 451 - protein, 1006 aa, Artificial Sequence
  CasX Variant
MQEIKRINKIRRRLVKDSNTKKAGKTGPMKTLLVRVMTPDLRERLENLRKKPENIPQPISNTSRANLNKLLTDYTEMKKAILHVYWEEFQKDPVGLMSRVAQPAPKNIDQRKLIPVKDGNERLTSSGFACSQCCQPLYVYKLEQVNDKGKPHTNYFGRCNVSEHERLILLSPHKPEANDELVTYSLGKFGQRALDFYSIHVTRESNHPVKPLEQIGGNSCASGPVGKALSDACMGAVASFLTKYQDIILEHQKVIKKNEKRLANLKDIASANGLAFPKITLPPQPHTKEGIEAYNNVVAQIVIWVNLNLWQKLKIGRDEAKPLQRLKGFPSFPLVERQANEVDWWDMVCNVKKLINEKKEDGKVFWQNLAGYKRQEALRPYLSSEEDRKKGKKFARYQFGDLLLHLEKKHGEDWGKVYDEAWERIDKKVEGLSKHIKLEEERRSEDAQSKAALTDWLRAKASFVIEGLKEADKDEFCRCELKLQKWYGDLRGKPFAIEAENSILDISGFSKQYNCAFIWQKDGVKKLNLYLIINYFKGGKLRFKKIKPEAFEANRFYTVINKKSGEIVPMEVNFNFDDPNLIILPLAFGKRQGREFIWNDLLSLETGSLKLANGRVIEKTLYNRRTRQDEPALFVALTFERREVLDSSNIKPMNLIGIDRGENIPAVIALTDPEGCPLSRFKDSLGNPTHILRIGESYKEKQRTIQAKKEVEQRRAGGYSRKYASKAKNLADDMVRNTARDLLYYAVTQDAMLIFENLSRGFGRQGKRTFMAERQYTRMEDWLTAKLAYEGLSKTYLSKTLAQYTSKTCSNCGFTITSADYDRVLEKLKKTATGWMTTINGKELKVEGQITYYNRYKRQNVVKDLSVELDRLSEESVNNDISSWTKGRSGEALSLLKKRFSHRPVQEKFVCLNCGFETHADEQAALNIARSWLFLRSQEYKKYQTNKTTGNTDKRAFVETWQSFYRKKLKEVWKPAVTSPKKKRKVPPPHKKKHPDASVNFSEFSK

SEQ ID NO: 452 - protein, 1007 aa, Artificial Sequence
  CasX Variant
MQEIKRINKIRRRLVKDSNTKKAGKTGPMKTLLVRVMTPDLRERLENLRKKPENIPQPISNTSRANLNKLLTDYTEMKKAILHVYWEEFQKDPVGLMSRVAQPAPKNIDQRKLIPVKDGNERLTSSGFACSQCCQPLYVYKLEQVNDKGKPHTNYFGRCNVSEHERLILLSPHKPEANDELVTYSLGKFGQRALDFYSIHVTRESNHPVKPLEQIGGNSCASGPVGKALSDACMGAVASFLTKYQDIILEHQKVIKKNEKRLANLKDIASANGLAFPKITLPPQPHTKEGIEAYNNVVAQIVIWVNLNLWQKLKIGRDEAKPLQRLKGFPSFPLVERQANEVDWWDMVCNVKKLINEKKEDGKVFWQNLAGYKRQEALRPYLSSEEDRKKGKKFARYQFGDLLLHLEKKHGEDWGKVYDEAWERIDKKVEGLSKHIKLEEERRSEDAQSKAALTDWLRAKASFVIEGLKEADKDEFCRCELKLQKWYGDLRGKPFAIEAENSILDISGFSKQYNCAFIWQKDGVKKLNLYLIINYFKGGKLRFKKIKPEAFEANRFYTVINKKSGEIVPMEVNFNFDDPNLIILPLAFGKRQGREFIWNDLLSLETGSLKLANGRVIEKTLYNRRTRQDEPALFVALTFERREVLDSSNIKPMNLIGIDRGENIPAVIALTDPEGCPLSRFKDSLGNPTHILRIGESYKEKQRTIQAKKEVEQRRAGGYSRKYASKAKNLADDMVRNTARDLLYYAVTQDAMLIFENLSRGFGRQGKRTFMAERQYTRMEDWLTAKLAYEGLSKTYLSKTLAQYTSKTCSNCGFTITSADYDRVLEKLKKTATGWMTTINGKELKVEGQITYYNRYKRQNVVKDLSVELDRLSEESVNNDISSWTKGRSGEALSLLKKRFSHRPVQEKFVCLNCGFETHADEQAALNIARSWLFLRSQEYKKYQTNKTTGNTDKRAFVETWQSFYRKKLKEVWKPAVTSPKKKRKVPPPQRPGPYDRPQRPGPYDRP

SEQ ID NO: 453 - protein, 1005 aa, Artificial Sequence
  CasX Variant
MQEIKRINKIRRRLVKDSNTKKAGKTGPMKTLLVRVMTPDLRERLENLRKKPENIPQPISNTSRANLNKLLTDYTEMKKAILHVYWEEFQKDPVGLMSRVAQPAPKNIDQRKLIPVKDGNERLTSSGFACSQCCQPLYVYKLEQVNDKGKPHTNYFGRCNVSEHERLILLSPHKPEANDELVTYSLGKFGQRALDFYSIHVTRESNHPVKPLEQIGGNSCASGPVGKALSDACMGAVASFLTKYQDIILEHQKVIKKNEKRLANLKDIASANGLAFPKITLPPQPHTKEGIEAYNNVVAQIVIWVNLNLWQKLKIGRDEAKPLQRLKGFPSFPLVERQANEVDWWDMVCNVKKLINEKKEDGKVFWQNLAGYKRQEALRPYLSSEEDRKKGKKFARYQFGDLLLHLEKKHGEDWGKVYDEAWERIDKKVEGLSKHIKLEEERRSEDAQSKAALTDWLRAKASFVIEGLKEADKDEFCRCELKLQKWYGDLRGKPFAIEAENSILDISGFSKQYNCAFIWQKDGVKKLNLYLIINYFKGGKLRFKKIKPEAFEANRFYTVINKKSGEIVPMEVNFNFDDPNLIILPLAFGKRQGREFIWNDLLSLETGSLKLANGRVIEKTLYNRRTRQDEPALFVALTFERREVLDSSNIKPMNLIGIDRGENIPAVIALTDPEGCPLSRFKDSLGNPTHILRIGESYKEKQRTIQAKKEVEQRRAGGYSRKYASKAKNLADDMVRNTARDLLYYAVTQDAMLIFENLSRGFGRQGKRTFMAERQYTRMEDWLTAKLAYEGLSKTYLSKTLAQYTSKTCSNCGFTITSADYDRVLEKLKKTATGWMTTINGKELKVEGQITYYNRYKRQNVVKDLSVELDRLSEESVNNDISSWTKGRSGEALSLLKKRFSHRPVQEKFVCLNCGFETHADEQAALNIARSWLFLRSQEYKKYQTNKTTGNTDKRAFVETWQSFYRKKLKEVWKPAVTSPKKKRKVPPPLSPSLSPLLSPSLSPL

SEQ ID NO: 454 - protein, 1008 aa, Artificial Sequence
  CasX Variant
MQEIKRINKIRRRLVKDSNTKKAGKTGPMKTLLVRVMTPDLRERLENLRKKPENIPQPISNTSRANLNKLLTDYTEMKKAILHVYWEEFQKDPVGLMSRVAQPAPKNIDQRKLIPVKDGNERLTMSSGFACSQCCQPLYVYKLEQVNDKGKPHTNYFGRCNVSEHERLILLSPHKPEANDELVTYSLGKFGQRALDFYSIHVTRESNHPVKPLEQIGGNSCASGPVGKALSDACMGAVASFLTKYQDIILEHQKVIKKNEKRLANLKDIASANGLAFPKITLPPQPHTKEGIEAYNNVVAQIVIWVNLNLWQKLKIGRDEAKPLQRLKGFPSFPLVERQANEVDWWDMVCNVKKLINEKKEDGKVFWQNLAGYKRQEALRPYLSSEEDRKKGKKFARYQFGDLLLHLEKKHGEDWGKVYDEAWERIDKKVEGLSKHIKLEEERRSEDAQSKAALTDWLRAKASFVIEGLKEADKDEFCRCELKLQKWYGDLRGKPFAIEAENSILDISGFSKQYNCAFIWQKDGVKKLNLYLIINYFKGGKLRFKKIKPEAFEANRFYTVINKKSGEIVPMEVNFNFDDPNLIILPLAFGKRQGREFIWNDLLSLETGSLKLANGRVIEKTLYNRRTRQDEPALFVALTFERREVLDSSNIKPMNLIGIDRGENIPAVIALTDPEGCPLSRFKDSLGNPTHILRIGESYKEKQRTIQAKKEVEQRRAGGYSRKYASKAKNLADDMVRNTARDLLYYAVTQDAMLIFENLSRGFGRQGKRTFMAERQYTRMEDWLTAKLAYEGLSKTYLSKTLAQYTSKTCSNCGFTITSADYDRVLEKLKKTATGWMTTINGKELKVEGQITYYNRYKRQNVVKDLSVELDRLSEESVNNDISSWTKGRSGEALSLLKKRFSHRPVQEKFVCLNCGFETHADEQAALNIARSWLFLRSQEYKKYQTNKTTGNTDKRAFVETWQSFYRKKLKEVWKPAVTSPKKKRKVPPPRGKGGKGLGKGGAKRHRK

SEQ ID NO: 455 - protein, 1013 aa, Artificial Sequence
  CasX Variant
MQEIKRINKIRRRLVKDSNTKKAGKTGPMKTLLVRVMTPDLRERLENLRKKPENIPQPISNTSRANLNKLLTDYTEMKKAILHVYWEEFQKDPVGLMSRVAQPAPKNIDQRKLIPVKDGNERLTSSGFACSQCCQPLYVYKLEQVNDKGKPHTNYFGRCNVSEHERLILLSPHKPEANDELVTYSLGKFGQRALDFYSIHVTRESNHPVKPLEQIGGNSCASGPVGKALSDACMGAVASFLTKYQDIILEHQKVIKKNEKRLANLKDIASANGLAFPKITLPPQPHTKEGIEAYNNVVAQIVIWVNLNLWQKLKIGRDEAKPLQRLKGFPSFPLVERQANEVDWWDMVCNVKKLINEKKEDGKVFWQNLAGYKRQEALRPYLSSEEDRKKGKKFARYQFGDLLLHLEKKHGEDWGKVYDEAWERIDKKVEGLSKHIKLEEERRSEDAQSKAALTDWLRAKASFVIEGLKEADKDEFCRCELKLQKWYGDLRGKPFAIEAENSILDISGFSKQYNCAFIWQKDGVKKLNLYLIINYFKGGKLRFKKIKPEAFEANRFYTVINKKSGEIVPMEVNFNFDDPNLIILPLAFGKRQGREFIWNDLLSLETGSLKLANGRVIEKTLYNRRTRQDEPALFVALTFERREVLDSSNIKPMNLIGIDRGENIPAVIALTDPEGCPLSRFKDSLGNPTHILRIGESYKEKQRTIQAKKEVEQRRAGGYSRKYASKAKNLADDMVRNTARDLLYYAVTQDAMLIFENLSRGFGRQGKRTFMAERQYTRMEDWLTAKLAYEGLSKTYLSKTLAQYTSKTCSNCGFTITSADYDRVLEKLKKTATGWMTTINGKELKVEGQITYYNRYKRQNVVKDLSVELDRLSEESVNNDISSWTKGRSGEALSLLKKRFSHRPVQEKFVCLNCGFETHADEQAALNIARSWLFLRSQEYKKYQTNKTTGNTDKRAFVETWQSFYRKKLKEVWKPAVTSPKKKRKVPPPSRRRKANPTKLSENAKKLAKEVEN

SEQ ID NO: 456 - protein, 998 aa, Artificial Sequence
  CasX Variant
MQEIKRINKIRRRLVKDSNTKKAGKTGPMKTLLVRVMTPDLRERLENLRKKPENIPQPISNTSRANLNKLLTDYTEMKKAILHVYWEEFQKDPVGLMSRVAQPAPKNIDQRKLIPVKDGNERLTSSGFACSQCCQPLYVYKLEQVNDKGKPHTNYFGRCNVSEHERLILLSPHKPEANDELVTYSLGKFGQRALDFYSIHVTRESNHPVKPLEQIGGNSCASGPVGKALSDACMGAVASFLTKYQDIILEHQKVIKKNEKRLANLKDIASANGLAFPKITLPPQPHTKEGIEAYNNVVAQIVIWVNLNLWQKLKIGRDEAKPLQRLKGFPSFPLVERQANEVDWWDMVCNVKKLINEKKEDGKVFWQNLAGYKRQEALRPYLSSEEDRKKGKKFARYQFGDLLLHLEKKHGEDWGKVYDEAWERIDKKVEGLSKHIKLEEERRSEDAQSKAALTDWLRAKASFVIEGLKEADKDEFCRCELKLQKWYGDLRGKPFAIEAENSILDISGFSKQYNCAFIWQKDGVKKLNLYLIINYFKGGKLRFKKIKPEAFEANRFYTVINKKSGEIVPMEVNFNFDDPNLIILPLAFGKRQGREFIWNDLLSLETGSLKLANGRVIEKTLYNRRTRQDEPALFVALTFERREVLDSSNIKPMNLIGIDRGENIPAVIALTDPEGCPLSRFKDSLGNPTHILRIGESYKEKQRTIQAKKEVEQRRAGGYSRKYASKAKNLADDMVRNTARDLLYYAVTQDAMLIFENLSRGFGRQGKRTFMAERQYTRMEDWLTAKLAYEGLSKTYLSKTLAQYTSKTCSNCGFTITSADYDRVLEKLKKTATGWMTTINGKELKVEGQITYYNRYKRQNVVKDLSVELDRLSEESVNNDISSWTKGRSGEALSLLKKRFSHRPVQEKFVCLNCGFETHADEQAALNIARSWLFLRSQEYKKYQTNKTTGNTDKRAFVETWQSFYRKKLKEVWKPAVTSPKKKRKVPPPPAAKRVKLD

SEQ ID NO: 457 - protein, 997 aa, Artificial Sequence
  CasX Variant
MQEIKRINKIRRRLVKDSNTKKAGKTGPMKTLLVRVMTPDLRERLENLRKKPENIPQPISNTSRANLNKLLTDYTEMKKAILHVYWEEFQKDPVGLMSRVAQPAPKNIDQRKLIPVKDGNERLTSSGFACSQCCQPLYVYKLEQVNDKGKPHTNYFGRCNVSEHERLILLSPHKPEANDELVTYSLGKFGQRALDFYSIHVTRESNHPVKPLEQIGGNSCASGPVGKALSDACMGAVASFLTKYQDIILEHQKVIKKNEKRLANLKDIASANGLAFPKITLPPQPHTKEGIEAYNNVVAQIVIWVNLNLWQKLKIGRDEAKPLQRLKGFPSFPLVERQANEVDWWDMVCNVKKLINEKKEDGKVFWQNLAGYKRQEALRPYLSSEEDRKKGKKFARYQFGDLLLHLEKKHGEDWGKVYDEAWERIDKKVEGLSKHIKLEEERRSEDAQSKAALTDWLRAKASFVIEGLKEADKDEFCRCELKLQKWYGDLRGKPFAIEAENSILDISGFSKQYNCAFIWQKDGVKKLNLYLIINYFKGGKLRFKKIKPEAFEANRFYTVINKKSGEIVPMEVNFNFDDPNLIILPLAFGKRQGREFIWNDLLSLETGSLKLANGRVIEKTLYNRRTRQDEPALFVALTFERREVLDSSNIKPMNLIGIDRGENIPAVIALTDPEGCPLSRFKDSLGNPTHILRIGESYKEKQRTIQAKKEVEQRRAGGYSRKYASKAKNLADDMVRNTARDLLYYAVTQDAMLIFENLSRGFGRQGKRTFMAERQYTRMEDWLTAKLAYEGLSKTYLSKTLAQYTSKTCSNCGFTITSADYDRVLEKLKKTATGWMTTINGKELKVEGQITYYNRYKRQNVVKDLSVELDRLSEESVNNDISSWTKGRSGEALSLLKKRFSHRPVQEKFVCLNCGFETHADEQAALNIARSWLFLRSQEYKKYQTNKTTGNTDKRAFVETWQSFYRKKLKEVWKPAVTSPKKKRKVPPPKRSFSKAF

SEQ ID NO: 458 - protein, 1008 aa, Artificial Sequence
  CasX Variant
MQEIKRINKIRRRLVKDSNTKKAGKTGPMKTLLVRVMTPDLRERLENLRKKPENIPQPISNTSRANLNKLLTDYTEMKKAILHVYWEEFQKDPVGLMSRVAQPAPKNIDQRKLIPVKDGNERLTSSGFACSQCCQPLYVYKLEQVNDKGKPHTNYFGRCNVSEHERLILLSPHKPEANDELVTYSLGKFGQRALDFYSIHVTRESNHPVKPLEQIGGNSCASGPVGKALSDACMGAVASFLTKYQDIILEHQKVIKKNEKRLANLKDIASANGLAFPKITLPPQPHTKEGIEAYNNVVAQIVIWVNLNLWQKLKIGRDEAKPLQRLKGFPSFPLVERQANEVDWWDMVCNVKKLINEKKEDGKVFWQNLAGYKRQEALRPYLSSEEDRKKGKKFARYQFGDLLLHLEKKHGEDWGKVYDEAWERIDKKVEGLSKHIKLEEERRSEDAQSKAALTDWLRAKASFVIEGLKEADKDEFCRCELKLQKWYGDLRGKPFAIEAENSILDISGFSKQYNCAFIWQKDGVKKLNLYLIINYFKGGKLRFKKIKPEAFEANRFYTVINKKSGEIVPMEVNFNFDDPNLIILPLAFGKRQGREFIWNDLLSLETGSLKLANGRVIEKTLYNRRTRQDEPALFVALTFERREVLDSSNIKPMNLIGIDRGENIPAVIALTDPEGCPLSRFKDSLGNPTHILRIGESYKEKQRTIQAKKEVEQRRAGGYSRKYASKAKNLADDMVRNTARDLLYYAVTQDAMLIFENLSRGFGRQGKRTFMAERQYTRMEDWLTAKLAYEGLSKTYLSKTLAQYTSKTCSNCGFTITSADYDRVLEKLKKTATGWMTTINGKELKVEGQITYYNRYKRQNVVKDLSVELDRLSEESVNNDISSWTKGRSGEALSLLKKRFSHRPVQEKFVCLNCGFETHADEQAALNIARSWLFLRSQEYKKYQTNKTTGNTDKRAFVETWQSFYRKKLKEVWKPAVTSPKKKRKVPPPKRGINDRNFWRGENERKTR

SEQ ID NO: 459 - protein, 1007 aa, Artificial Sequence
  CasX Variant
MAPKKKRKVSRMQEIKRINKIRRRLVKDSNTKKAGKTGPMKTLLVRVMTPDLRERLENLRKKPENIPQPISNTSRANLNKLLTDYTEMKKAILHVYWEEFQKDPVGLMSRVAQPAPKNIDQRKLIPVKDGNERLTSSGFACSQCCQPLYVYKLEQVNDKGKPHTNYFGRCNVSEHERLILLSPHKPEANDELVTYSLGKFGQRALDFYSIHVTRESNHPVKPLEQIGGNSCASGPVGKALSDACMGAVASFLTKYQDIILEHQKVIKKNEKRLANLKDIASANGLAFPKITLPPQPHTKEGIEAYNNVVAQIVIWVNLNLWQKLKIGRDEAKPLQRLKGFPSFPLVERQANEVDWWDMVCNVKKLINEKKEDGKVFWQNLAGYKRQEALRPYLSSEEDRKKGKKFARYQFGDLLLHLEKKHGEDWGKVYDEAWERIDKKVEGLSKHIKLEEERRSEDAQSKAALTDWLRAKASFVIEGLKEADKDEFCRCELKLQKWYGDLRGKPFAIEAENSILDISGFSKQYNCAFIWQKDGVKKLNLYLIINYFKGGKLRFKKIKPEAFEANRFYTVINKKSGEIVPMEVNFNFDDPNLIILPLAFGKRQGREFIWNDLLSLETGSLKLANGRVIEKTLYNRRTRQDEPALFVALTFERREVLDSSNIKPMNLIGIDRGENIPAVIALTDPEGCPLSRFKDSLGNPTHILRIGESYKEKQRTIQAKKEVEQRRAGGYSRKYASKAKNLADDMVRNTARDLLYYAVTQDAMLIFENLSRGFGRQGKRTFMAERQYTRMEDWLTAKLAYEGLSKTYLSKTLAQYTSKTCSNCGFTITSADYDRVLEKLKKTATGWMTTINGKELKVEGQITYYNRYKRQNVVKDLSVELDRLSEESVNNDISSWTKGRSGEALSLLKKRFSHRPVQEKFVCLNCGFETHADEQAALNIARSWLFLRSQEYKKYQTNKTTGNTDKRAFVETWQSFYRKKLKEVWKPAVTSPKKKRKVPPPPKKKRKV

SEQ ID NO: 460 - protein, 1009 aa, Artificial Sequence
  CasX Variant
MAPKKKRKVSRMQEIKRINKIRRRLVKDSNTKKAGKTGPMKTLLVRVMTPDLRERLENLRKKPENIPQPISNTSRANLNKLLTDYTEMKKAILHVYWEEFQKDPVGLMSRVAQPAPKNIDQRKLIPVKDGNERLTSSGFACSQCCQPLYVYKLEQVNDKGKPHTNYFGRCNVSEHERLILLSPHKPEANDELVTYSLGKFGQRALDFYSIHVTRESNHPVKPLEQIGGNSCASGPVGKALSDACMGAVASFLTKYQDIILEHQKVIKKNEKRLANLKDIASANGLAFPKITLPPQPHTKEGIEAYNNVVAQIVIWVNLNLWQKLKIGRDEAKPLQRLKGFPSFPLVERQANEVDWWDMVCNVKKLINEKKEDGKVFWQNLAGYKRQEALRPYLSSEEDRKKGKKFARYQFGDLLLHLEKKHGEDWGKVYDEAWERIDKKVEGLSKHIKLEEERRSEDAQSKAALTDWLRAKASFVIEGLKEADKDEFCRCELKLQKWYGDLRGKPFAIEAENSILDISGFSKQYNCAFIWQKDGVKKLNLYLIINYFKGGKLRFKKIKPEAFEANRFYTVINKKSGEIVPMEVNFNFDDPNLIILPLAFGKRQGREFIWNDLLSLETGSLKLANGRVIEKTLYNRRTRQDEPALFVALTFERREVLDSSNIKPMNLIGIDRGENIPAVIALTDPEGCPLSRFKDSLGNPTHILRIGESYKEKQRTIQAKKEVEQRRAGGYSRKYASKAKNLADDMVRNTARDLLYYAVTQDAMLIFENLSRGFGRQGKRTFMAERQYTRMEDWLTAKLAYEGLSKTYLSKTLAQYTSKTCSNCGFTITSADYDRVLEKLKKTATGWMTTINGKELKVEGQITYYNRYKRQNVVKDLSVELDRLSEESVNNDISSWTKGRSGEALSLLKKRFSHRPVQEKFVCLNCGFETHADEQAALNIARSWLFLRSQEYKKYQTNKTTGNTDKRAFVETWQSFYRKKLKEVWKPAVTSPKKKRKVPPPPAAKRVKLD

SEQ ID NO: 461 - DNA, 21 bp, Betapolyomavirus macaca mulatta polyomavirus 1
ccaaagaagaagcggaaggtc

SEQ ID NO: 462 - DNA, 51 bp, Unknown
  nuclear localization signal
cacaagaagaaacatccagacgcatcagtcaactttagcgagttcagtaaa

SEQ ID NO: 463 - DNA, 54 bp, Unknown
  nuclear localization signal
cagcgccctgggccttacgataggccgcaaagacccggaccgtatgatcgccct

SEQ ID NO: 464 - DNA, 48 bp, Unknown
  nuclear localization signal
ctcagcccgagtcttagtccactgctttccccgtccctgtctccactg

SEQ ID NO: 465 - DNA, 54 bp, Unknown
  nuclear localization signal
cggggcaagggtggcaaggggcttggcaaggggggggcaaagaggcacaggaag

SEQ ID NO: 466 - DNA, 72 bp, Unknown
  nuclear localization signal
agccgccgcagaaaagccaatcctacaaaactgtcagaaaatgcgaaaaaacttgctaaggaggtggaaaac

SEQ ID NO: 467 - DNA, 27 bp, Homo sapiens
cctgccgcaaagcgagtgaaattggac

SEQ ID NO: 468 - DNA, 24 bp, Unknown
  nuclear localization signal
aagcggtccttcagtaaggccttt

SEQ ID NO: 469 - DNA, 57 bp, Alphainfluenzavirus influenza A virus
aaacggggaataaacgaccggaacttctggcgcggggaaaacgagcgcaaaacccga

SEQ ID NO: 470 - protein, 24 aa, Unknown
  nuclear localization signal
SRRRKANPTKLSENAKKLAKEVEN

SEQ ID NO: 471 - DNA, 2991 bp, Artificial Sequence
  CasX Variant 387
atggccccaaagaagaagcggaaggtctctagacaagagatcaagagaatcaacaagatcagaaggagactggtcaaggacagcaacacaaagaaggccggcaagacaggccccatgaaaaccctgctcgtcagagtgatgacccctgacctgagagagcggctggaaaacctgagaaagaagcccgagaacatccctcagcctatcagcaacaccagcagggccaacctgaacaagctgctgaccgactacaccgagatgaagaaagccatcctgcacgtgtactgggaagagttccagaaagaccccgtgggcctgatgagcagagttgctcagcctgccagcaagaagatcgaccagaacaagctgaagcccgagatggacgagaagggcaatctgaccacagccggctttgcctgctctcagtgtggccagcctctgttcgtgtacaagctggaacaggtgtccgagaaaggcaaggcctacaccaactacttcggcagatgtaacgtggccgagcacgagaagctgattctgctggcccagctgaaacctgagaaggactctgatgaggccgtgacctacagcctgggcaagtttggacagagagccctggacttctacagcatccacgtgaccagggagagcaatcaccctgtgaagcccctggaacagatcggcggcaatagctgtgcctctggacctgtgggaaaagccctgagcgacgcctgtatgggagccgtggcatccttcctgaccaagtaccaggacatcatcctggaacaccagaaagtgatcaagaagaacgagaaaagactggccaacctcaaggatatcgccagcgctaacggcctggcctttcctaagatcaccctgcctccacagcctcacaccaaagagggcatcgaggcctacaacaacgtggtggcccagatcgtgatttgggtcaacctgaatctgtggcagaagctgaagatcggcagggacgaagccaagccactgcagagactgaagggcttccctagcttccctctggtggaaagacaggccaatgaagtggattggtgggacatggtctgcaacgtgaagaagctgatcaacgagaagaaagaggatggcaaggttttctggcagaacctggccggctacaagagacaagaagccctgaggccttacctgagcagcgaagaggaccggaagaagggcaagaagttcgccagataccagttcggcgacctgctgctgcacctggaaaagaagcacggcgaggactggggcaaagtgtacgatgaggcctgggagagaatcgacaagaaggtggaaggcctgagcaagcacattaagctggaagaggaaagaaggagcgaggacgcccaatctaaagccgctctgaccgattggctgagagccaaggccagctttgtgatcgagggcctgaaagaggccgacaaggacgagttctgcagatgcgagctgaagctgcagaagtggtacggcgatctgagaggcaagcccttcgccattgaggccgagaacagcatcctggacatcagcggcttcagcaagcagtacaactgcgccttcatttggcagaaagacggcgtcaagaaactgaacctgtacctgatcatcaattacttcaaaggcggcaagctgcggttcaagaagatcaaacccgaggccttcgaggctaacagattctacaccgtgatcaacaaaaagtccggcgagatcgtgcccatggaagtgaacttcaacttcgacgaccccaacctgattatcctgcctctggccttcggcaagagacagggcagagagttcatctggaacgatctgctgagcctggaaaccggctctctgaagctggccaatggcagagtgatcgagaaaaccctgtacaacaggagaaccagacaggacgagcctgctctgtttgtggccctgaccttcgagagaagagaggtgctggacagcagcaacatcaagcccatgaacctgatcggcatcgaccggggcgagaatatccctgctgtgatcgccctgacagaccctgaaggatgcccactgagcagattcaaggactccctgggcaaccctacacacatcctgagaatcggcgagagctacaaagagaagcagaggacaatccaggccaagaaagaggtggaacagagaagagccggcggatactctaggaagtacgccagcaaggccaagaatctggccgacgacatggtccgaaacaccgccagagatctgctgtactacgccgtgacacaggacgccatgctgatcttcgagaatctgagcagaggcttcggccggcagggcaagagaacctttatggccgagaggcagtacaccagaatggaagattggctcacagctaaactggcctacgagggactgagcaagacctacctgtccaaaacactggcccagtatacctccaagacctgcagcaattgcggcttcaccatcaccagcgccgactacgacagagtgctggaaaagctcaagaaaaccgccaccggctggatgaccaccatcaacggcaaagagctgaaggttgagggccagatcacctactacaacaggtacaagaggcagaacgtcgtgaaggatctgagcgtggaactggacagactgagcgaagagagcgtgaacaacgacatcagcagctggacaaagggcagatcaggcgaggctctgagcctgctgaagaagaggtttagccacagacctgtgcaagagaagttcgtgtgcctgaactgcggcttcgagacacacgccgatgaacaggctgccctgaacattgccagaagctggctgttcctgagaagccaagagtacaagaagtaccagaccaacaagaccaccggcaacaccgacaagagggcctttgtggaaacctggcagagcttctacagaaaaaagctgaaagaagtctggaagcccgccgtgactagtccaaaaaagaagagaaaggta

SEQ ID NO: 472 - protein, 995 aa, Artificial Sequence
  CasX Variant 387
MAPKKKRKVSRQEIKRINKIRRRLVKDSNTKKAGKTGPMKTLLVRVMTPDLRERLENLRKKPENIPQPISNTSRANLNKLLTDYTEMKKAILHVYWEEFQKDPVGLMSRVAQPASKKIDQNKLKPEMDEKGNLTTAGFACSQCGQPLFVYKLEQVSEKGKAYTNYFGRCNVAEHEKLILLAQLKPEKDSDEAVTYSLGKFGQRALDFYSIHVTRESNHPVKPLEQIGGNSCASGPVGKALSDACMGAVASFLTKYQDIILEHQKVIKKNEKRLANLKDIASANGLAFPKITLPPQPHTKEGIEAYNNVVAQIVIWVNLNLWQKLKIGRDEAKPLQRLKGFPSFPLVERQANEVDWWDMVCNVKKLINEKKEDGKVFWQNLAGYKRQEALRPYLSSEEDRKKGKKFARYQFGDLLLHLEKKHGEDWGKVYDEAWERIDKKVEGLSKHIKLEEERRSEDAQSKAALTDWLRAKASFVIEGLKEADKDEFCRCELKLQKWYGDLRGKPFAIEAENSILDISGFSKQYNCAFIWQKDGVKKLNLYLIINYFKGGKLRFKKIKPEAFEANRFYTVINKKSGEIVPMEVNFNFDDPNLIILPLAFGKRQGREFIWNDLLSLETGSLKLANGRVIEKTLYNRRTRQDEPALFVALTFERREVLDSSNIKPMNLIGIDRGENIPAVIALTDPEGCPLSRFKDSLGNPTHILRIGESYKEKQRTIQAKKEVEQRRAGGYSRKYASKAKNLADDMVRNTARDLLYYAVTQDAMLIFENLSRGFGRQGKRTFMAERQYTRMEDWLTAKLAYEGLSKTYLSKTLAQYTSKTCSNCGFTITSADYDRVLEKLKKTATGWMTTINGKELKVEGQITYYNRYKRQNVVKDLSVELDRLSEESVNNDISSWTKGRSGEALSLLKKRFSHRPVQEKFVCLNCGFETHADEQAALNIARSWLFLRSQEYKKYQTNKTTGNTDKRAFVETWQSFYRKKLKEVWKPAVTSPKKKR

SEQ ID NO: 473 - DNA, 2988 bp, Artificial Sequence
  CasX Variant 395
atggccccaaagaagaagcggaaggtctctagacaagagatcaagagaatcaacaagatcagaaggagactggtcaaggacagcaacacaaagaaggccggcaagacaggccccatgaaaaccctgctcgtcagagtgatgacccctgacctgagagagcggctggaaaacctgagaaagaagcccgagaacatccctcagcctatcagcaacaccagcagggccaacctgaacaagctgctgaccgactacaccgagatgaagaaagccatcctgcacgtgtactgggaagagttccagaaagaccccgtgggcctgatgagcagagttgctcagcccgctcctaagaacatcgaccagagaaagctgatccccgtgaaggacggcaacgagagactgacctctagcggctttgcctgcagccagtgttgccagcctctgtacgtgtacaagctggaacaagtgaacgacaagggcaagccccacaccaactacttcggcagatgcaacgtgtccgagcacgagaggctgatcctgctgtctcctcacaagcccgaggccaacgatgagctggtcacatacagcctgggcaagttcggacagagagccctggacttctacagcatccacgtgaccaaagaaagcacacaccccgtgaagcccctggctcagatcgccggcaatagatacgcctctggacctgtgggcaaagccctgtccgatgcctgcatgggaacaatcgccagcttcctgagcaagtaccaggacatcatcatcgagcaccagaaggtggtcaagggcaaccagaagagactggaaagcctgagggagctggccggcaaagagaacctggaataccccagcgtgaccctgcctcctcagcctcacacaaaagaaggcgtggacgcctacaacgaagtgatcgccagagtgagaatgtgggtcaacctgaacctgtggcagaagctgaaactgtccagggacgacgccaagcctctgctgagactgaagggcttccctagcttccctctggtggaaagacaggccaatgaagtggattggtgggacatggtctgcaacgtgaagaagctgatcaacgagaagaaagaggatggcaaggttttctggcagaacctggccggctacaagagacaagaagccctgaggccttacctgagcagcgaagaggaccggaagaagggcaagaagttcgccagataccagttcggcgacctgctgctgcacctggaaaagaagcacggcgaggactggggcaaagtgtacgatgaggcctgggagagaatcgacaagaaggtggaaggcctgagcaagcacattaagctggaagaggaaagaaggagcgaggacgcccaatctaaagccgctctgaccgattggctgagagccaaggccagctttgtgatcgagggcctgaaagaggccgacaaggacgagttctgcagatgcgagctgaagctgcagaagtggtacggcgatctgagaggcaagcccttcgccattgaggccgagaacagcatcctggacatcagcggcttcagcaagcagtacaactgcgccttcatttggcagaaagacggcgtcaagaaactgaacctgtacctgatcatcaattacttcaaaggcggcaagctgcggttcaagaagatcaaacccgaggccttcgaggctaacagattctacaccgtgatcaacaaaaagtccggcgagatcgtgcccatggaagtgaacttcaacttcgacgaccccaacctgattatcctgcctctggccttcggcaagagacagggcagagagttcatctggaacgatctgctgagcctggaaaccggctctctgaagctggccaatggcagagtgatcgagaaaaccctgtacaacaggagaaccagacaggacgagcctgctctgtttgtggccctgaccttcgagagaagagaggtgctggacagcagcaacatcaagcccatgaacctgatcggcatcgaccggggcgagaatatccctgctgtgatcgccctgacagaccctgaaggatgcccactgagcagattcaaggactccctgggcaaccctacacacatcctgagaatcggcgagagctacaaagagaagcagaggacaatccaggccaagaaagaggtggaacagagaagagccggcggatactctaggaagtacgccagcaaggccaagaatctggccgacgacatggtccgaaacaccgccagagatctgctgtactacgccgtgacacaggacgccatgctgatcttcgagaatctgagcagaggcttcggccggcagggcaagagaacctttatggccgagaggcagtacaccagaatggaagattggctcacagctaaactggcctacgagggactgagcaagacctacctgtccaaaacactggcccagtatacctccaagacctgcagcaattgcggcttcaccatcaccagcgccgactacgacagagtgctggaaaagctcaagaaaaccgccaccggctggatgaccaccatcaacggcaaagagctgaaggttgagggccagatcacctactacaacaggtacaagaggcagaacgtcgtgaaggatctgagcgtggaactggacagactgagcgaagagagcgtgaacaacgacatcagcagctggacaaagggcagatcaggcgaggctctgagcctgctgaagaagaggtttagccacagacctgtgcaagagaagttcgtgtgcctgaactgcggcttcgagacacacgccgatgaacaggctgccctgaacattgccagaagctggctgttcctgagaagccaagagtacaagaagtaccagaccaacaagaccaccggcaacaccgacaagagggcctttgtggaaacctggcagagcttctacagaaaaaagctgaaagaagtctggaagcccgccgtgactagtccaaaaaagaagagaaaggta

SEQ ID NO: 474 - protein, 1005 aa, Artificial Sequence
  CasX Variant 395
MAPKKKRKVSRQEIKRINKIRRRLVKDSNTKKAGKTGPMKTLLVRVMTPDLRERLENLRKKPENIPQPISNTSRANLNKLLTDYTEMKKAILHVYWEEFQKDPVGLMSRVAQPAPKNIDQRKLIPVKDGNERLTSSGFACSQCCQPLYVYKLEQVNDKGKPHTNYFGRCNVSEHERLILLSPHKPEANDELVTYSLGKFGQRALDFYSIHVTKESTHPVKPLAQIAGNRYASGPVGKALSDACMGTIASFLSKYQDIIIEHQKVVKGNQKRLESLRELAGKENLEYPSVTLPPQPHTKEGVDAYNEVIARVRMWVNLNLWQKLKLSRDDAKPLLRLKGFPSFPLVERQANEVDWWDMVCNVKKLINEKKEDGKVFWQNLAGYKRQEALRPYLSSEEDRKKGKKFARYQFGDLLLHLEKKHGEDWGKVYDEAWERIDKKVEGLSKHIKLEEERRSEDAQSKAALTDWLRAKASFVIEGLKEADKDEFCRCELKLQKWYGDLRGKPFAIEAENSILDISGFSKQYNCAFIWQKDGVKKLNLYLIINYFKGGKLRFKKIKPEAFEANRFYTVINKKSGEIVPMEVNFNFDDPNLIILPLAFGKRQGREFIWNDLLSLETGSLKLANGRVIEKTLYNRRTRQDEPALFVALTFERREVLDSSNIKPMNLIGIDRGENIPAVIALTDPEGCPLSRFKDSLGNPTHILRIGESYKEKQRTIQAKKEVEQRRAGGYSRKYASKAKNLADDMVRNTARDLLYYAVTQDAMLIFENLSRGFGRQGKRTFMAERQYTRMEDWLTAKLAYEGLSKTYLSKTLAQYTSKTCSNCGFTITSADYDRVLEKLKKTATGWMTTINGKELKVEGQITYYNRYKRQNVVKDLSVELDRLSEESVNNDISSWTKGRSGEALSLLKKRFSHRPVQEKFVCLNCGFETHADEQAALNIARSWLFLRSQEYKKYQTNKTTGNTDKRAFVETWQSFYRKKLKEVWKPAVTSPKKKRKVTSPKKKRKV

SEQ ID NO: 475 - DNA, 2988 bp, Artificial Sequence
  CasX Variant 485
atggccccaaagaagaagcggaaggtctctagacaagagatcaagagaatcaacaagatcagaaggagactggtcaaggacagcaacacaaagaaggccggcaagacaggccccatgaaaaccctgctcgtcagagtgatgacccctgacctgagagagcggctggaaaacctgagaaagaagcccgagaacatccctcagcctatcagcaacaccagcagggccaacctgaacaagctgctgaccgactacaccgagatgaagaaagccatcctgcacgtgtactgggaagagttccagaaagaccccgtgggcctgatgagcagagttgctcagcccgctcctaagaacatcgaccagagaaagctgatccccgtgaaggacggcaacgagagactgacctctagcggctttgcctgcagccagtgttgccagcctctgtacgtgtacaagctggaacaagtgaacgacaagggcaagccccacaccaactacttcggcagatgcaacgtgtccgagcacgagaggctgatcctgctgtctcctcacaagcccgaggccaacgatgagctggtcacatacagcctgggcaagttcggacagagagccctggacttctacagcatccacgtgaccaaagaaagcacacaccccgtgaagcccctggctcagatcgccggcaatagatacgcctctggacctgtgggcaaagccctgtccgatgcctgcatgggaacaatcgccagcttcctgagcaagtaccaggacatcatcatcgagcaccagaaggtggtcaagggcaaccagaagagactggaaagcctgagggagctggccggcaaagagaacctggaataccccagcgtgaccctgcctcctcagcctcacacaaaagaaggcgtggacgcctacaacgaagtgatcgccagagtgagaatgtgggtcaacctgaacctgtggcagaagctgaaactgtccagggacgacgccaagcctctgctgagactgaagggcttccctagcttccctctggtggaaagacaggccaatgaagtggattggtgggacatggtctgcaacgtgaagaagctgatcaacgagaagaaagaggatggcaaggttttctggcagaacctggccggctacaagagacaagaagccctgaggccttacctgagcagcgaagaggaccggaagaagggcaagaagttcgccagataccagctgggcgacctgctgctgcacctggaaaagaagcacggcgaggactggggcaaagtgtacgatgaggcctgggagagaatcgacaagaaggtggaaggcctgagcaagcacattaagctggaagaggaaagaaggagcgaggacgcccaatctaaagccgctctgaccgattggctgagagccaaggccagctttgtgatcgagggcctgaaagaggccgacaaggacgagttctgcagatgcgagctgaagctgcagaagtggtacggcgatctgagaggcaagcccttcgccattgaggccgagaacagcatcctggacatcagcggcttcagcaagcagtacaactgcgccttcatttggcagaaagacggcgtcaagaaactgaacctgtacctgatcatcaattacttcaaaggcggcaagctgcggttcaagaagatcaaacccgaggccttcgaggctaacagattctacaccgtgatcaacaaaaagtccggcgagatcgtgcccatggaagtgaacttcaacttcgacgaccccaacctgattatcctgcctctggccttcggcaagagacagggcagagagttcatctggaacgatctgctgagcctggaaaccggctctctgaagctggccaatggcagagtgatcgagaaaaccctgtacaacaggagaaccagacaggacgagcctgctctgtttgtggccctgaccttcgagagaagagaggtgctggacagcagcaacatcaagcccatgaacctgatcggcgtggaccggggcgagaatatccctgctgtgatcgccctgacagaccctgaaggatgcccactgagcagattcaaggactccctgggcaaccctacacacatcctgagaatcggcgagagctacaaagagaagcagaggacaatccaggccaagaaagaggtggaacagagaagagccggcggatactctaggaagtacgccagcaaggccaagaatctggccgacgacatggtccgaaacaccgccagagatctgctgtactacgccgtgacacaggacgccatgctgatcttcgagaatctgagcagaggcttcggccggcagggcaagagaacctttatggccgagaggcagtacaccagaatggaagattggctcacagctaaactggcctacgagggactgagcaagacctacctgtccaaaacactggcccagtatacctccaagacctgcagcaattgcggcttcaccatcaccagcgccgactacgacagagtgctggaaaagctcaagaaaaccgccaccggctggatgaccaccatcaacggcaaagagctgaaggttgagggccagatcacctactacaacaggaggaagaggcagaacgtcgtgaaggatctgagcgtggaactggacagactgagcgaagagagcgtgaacaacgacatcagcagctggacaaagggcagatcaggcgaggctctgagcctgctgaagaagaggtttagccacagacctgtgcaagagaagttcgtgtgcctgaactgcggcttcgagacacacgccgatgaacaggctgccctgaacattgccagaagctggctgttcctgagaagccaagagtacaagaagtaccagaccaacaagaccaccggcaacaccgacaagagggcctttgtggaaacctggcagagcttctacagaaaaaagctgaaagaagtctggaagcccgccgtgactagtccaaaaaagaagagaaaggta

SEQ ID NO: 476 - protein, 996 aa, Artificial Sequence
  CasX Variant 485
MAPKKKRKVSRQEIKRINKIRRRLVKDSNTKKAGKTGPMKTLLVRVMTPDLRERLENLRKKPENIPQPISNTSRANLNKLLTDYTEMKKAILHVYWEEFQKDPVGLMSRVAQPAPKNIDQRKLIPVKDGNERLTSSGFACSQCCQPLYVYKLEQVNDKGKPHTNYFGRCNVSEHERLILLSPHKPEANDELVTYSLGKFGQRALDFYSIHVTKESTHPVKPLAQIAGNRYASGPVGKALSDACMGTIASFLSKYQDIIIEHQKVVKGNQKRLESLRELAGKENLEYPSVTLPPQPHTKEGVDAYNEVIARVRMWVNLNLWQKLKLSRDDAKPLLRLKGFPSFPLVERQANEVDWWDMVCNVKKLINEKKEDGKVFWQNLAGYKRQEALRPYLSSEEDRKKGKKFARYQLGDLLLHLEKKHGEDWGKVYDEAWERIDKKVEGLSKHIKLEEERRSEDAQSKAALTDWLRAKASFVIEGLKEADKDEFCRCELKLQKWYGDLRGKPFAIEAENSILDISGFSKQYNCAFIWQKDGVKKLNLYLIINYFKGGKLRFKKIKPEAFEANRFYTVINKKSGEIVPMEVNFNFDDPNLIILPLAFGKRQGREFIWNDLLSLETGSLKLANGRVIEKTLYNRRTRQDEPALFVALTFERREVLDSSNIKPMNLIGVDRGENIPAVIALTDPEGCPLSRFKDSLGNPTHILRIGESYKEKQRTIQAKKEVEQRRAGGYSRKYASKAKNLADDMVRNTARDLLYYAVTQDAMLIFENLSRGFGRQGKRTFMAERQYTRMEDWLTAKLAYEGLSKTYLSKTLAQYTSKTCSNCGFTITSADYDRVLEKLKKTATGWMTTINGKELKVEGQITYYNRRKRQNVVKDLSVELDRLSEESVNNDISSWTKGRSGEALSLLKKRFSHRPVQEKFVCLNCGFETHADEQAALNIARSWLFLRSQEYKKYQTNKTTGNTDKRAFVETWQSFYRKKLKEVWKPAVTSPKKKRKV

SEQ ID NO: 477 - DNA, 2988 bp, Artificial Sequence
  CasX Variant 486
atggccccaaagaagaagcggaaggtctctagacaagagatcaagagaatcaacaagatcagaaggagactggtcaaggacagcaacacaaagaaggccggcaagacaggccccatgaaaaccctgctcgtcagagtgatgacccctgacctgagagagcggctggaaaacctgagaaagaagcccgagaacatccctcagcctatcagcaacaccagcagggccaacctgaacaagctgctgaccgactacaccgagatgaagaaagccatcctgcacgtgtactgggaagagttccagaaagaccccgtgggcctgatgagcagagttgctcagcccgctcctaagaacatcgaccagagaaagctgatccccgtgaaggacggcaacgagagactgacctctagcggctttgcctgcagccagtgttgccagcctctgtacgtgtacaagctggaacaagtgaacgacaagggcaagccccacaccaactacttcggcagatgcaacgtgtccgagcacgagaggctgatcctgctgtctcctcacaagcccgaggccaacgatgagctggtcacatacagcctgggcaagttcggacagagagccctggacttctacagcatccacgtgaccaaagaaagcacacaccccgtgaagcccctggctcagatcgccggcaatagatacgcctctggacctgtgggcaaagccctgtccgatgcctgcatgggaacaatcgccagcttcctgagcaagtaccaggacatcatcatcgagcaccagaaggtggtcaagggcaaccagaagagactggaaagcctgagggagctggccggcaaagagaacctggaataccccagcgtgaccctgcctcctcagcctcacacaaaagaaggcgtggacgcctacaacgaagtgatcgccagagtgagaatgtgggtcaacctgaacctgtggcagaagctgaaactgtccagggacgacgccaagcctctgctgagactgaagggcttccctagcttccctctggtggaaagacaggccaatgaagtggattggtgggacatggtctgcaacgtgaagaagctgatcaacgagaagaaagaggatggcaaggttttctggcagaacctggccggctacaagagacaagaagccctgaggccttacctgagcagcgaagaggaccggaagaagggcaagaagttcgccagataccagctgggcgacctgctgaagcacctggaaaagaagcacggcgaggactggggcaaagtgtacgatgaggcctgggagagaatcgacaagaaggtggaaggcctgagcaagcacattaagctggaagaggaaagaaggagcgaggacgcccaatctaaagccgctctgaccgattggctgagagccaaggccagctttgtgatcgagggcctgaaagaggccgacaaggacgagttctgcagatgcgagctgaagctgcagaagtggtacggcgatctgagaggcaagcccttcgccattgaggccgagaacagcatcctggacatcagcggcttcagcaagcagtacaactgcgccttcatttggcagaaagacggcgtcaagaaactgaacctgtacctgatcatcaattacttcaaaggcggcaagctgcggttcaagaagatcaaacccgaggccttcgaggctaacagattctacaccgtgatcaacaaaaagtccggcgagatcgtgcccatggaagtgaacttcaacttcgacgaccccaacctgattatcctgcctctggccttcggcaagagacagggcagagagttcatctggaacgatctgctgagcctggaaaccggctctctgaagctggccaatggcagagtgatcgagaaaaccctgtacaacaggagaaccagacaggacgagcctgctctgtttgtggccctgaccttcgagagaagagaggtgctggacagcagcaacatcaagcccatgaacctgatcggcgtggaccggggcgagaatatccctgctgtgatcgccctgacagaccctgaaggatgcccactgagcagattcaaggactccctgggcaaccctacacacatcctgagaatcggcgagagctacaaagagaagcagaggacaatccaggccaagaaagaggtggaacagagaagagccggcggatactctaggaagtacgccagcaaggccaagaatctggccgacgacatggtccgaaacaccgccagagatctgctgtactacgccgtgacacaggacgccatgctgatcttcgagaatctgagcagaggcttcggccggcagggcaagagaacctttatggccgagaggcagtacaccagaatggaagattggctcacagctaaactggcctacgagggactgagcaagacctacctgtccaaaacactggcccagtatacctccaagacctgcagcaattgcggcttcaccatcaccagcgccgactacgacagagtgctggaaaagctcaagaaaaccgccaccggctggatgaccaccatcaacggcaaagagctgaaggttgagggccagatcacctactacaacaggaggaagaggcagaacgtcgtgaaggatctgagcgtggaactggacagactgagcgaagagagcgtgaacaacgacatcagcagctggacaaagggcagatcaggcgaggctctgagcctgctgaagaagaggtttagccacagacctgtgcaagagaagttcgtgtgcctgaactgcggcttcgagacacacgccgatgaacaggctgccctgaacattgccagaagctggctgttcctgagaagccaagagtacaagaagtaccagaccaacaagaccaccggcaacaccgacaagagggcctttgtggaaacctggcagagcttctacagaaaaaagctgaaagaagtctggaagcccgccgtgactagtccaaaaaagaagagaaaggta

SEQ ID NO: 478 - protein, 996 aa, Artificial Sequence
  CasX Variant 486
MAPKKKRKVSRQEIKRINKIRRRLVKDSNTKKAGKTGPMKTLLVRVMTPDLRERLENLRKKPENIPQPISNTSRANLNKLLTDYTEMKKAILHVYWEEFQKDPVGLMSRVAQPAPKNIDQRKLIPVKDGNERLTSSGFACSQCCQPLYVYKLEQVNDKGKPHTNYFGRCNVSEHERLILLSPHKPEANDELVTYSLGKFGQRALDFYSIHVTKESTHPVKPLAQIAGNRYASGPVGKALSDACMGTIASFLSKYQDIIIEHQKVVKGNQKRLESLRELAGKENLEYPSVTLPPQPHTKEGVDAYNEVIARVRMWVNLNLWQKLKLSRDDAKPLLRLKGFPSFPLVERQANEVDWWDMVCNVKKLINEKKEDGKVFWQNLAGYKRQEALRPYLSSEEDRKKGKKFARYQLGDLLKHLEKKHGEDWGKVYDEAWERIDKKVEGLSKHIKLEEERRSEDAQSKAALTDWLRAKASFVIEGLKEADKDEFCRCELKLQKWYGDLRGKPFAIEAENSILDISGFSKQYNCAFIWQKDGVKKLNLYLIINYFKGGKLRFKKIKPEAFEANRFYTVINKKSGEIVPMEVNFNFDDPNLIILPLAFGKRQGREFIWNDLLSLETGSLKLANGRVIEKTLYNRRTRQDEPALFVALTFERREVLDSSNIKPMNLIGVDRGENIPAVIALTDPEGCPLSRFKDSLGNPTHILRIGESYKEKQRTIQAKKEVEQRRAGGYSRKYASKAKNLADDMVRNTARDLLYYAVTQDAMLIFENLSRGFGRQGKRTFMAERQYTRMEDWLTAKLAYEGLSKTYLSKTLAQYTSKTCSNCGFTITSADYDRVLEKLKKTATGWMTTINGKELKVEGQITYYNRRKRQNVVKDLSVELDRLSEESVNNDISSWTKGRSGEALSLLKKRFSHRPVQEKFVCLNCGFETHADEQAALNIARSWLFLRSQEYKKYQTNKTTGNTDKRAFVETWQSFYRKKLKEVWKPAVTSPKKKRKV

SEQ ID NO: 479 - DNA, 2988 bp, Artificial Sequence
  CasX Variant 487
atggccccaaagaagaagcggaaggtctctagacaagagatcaagagaatcaacaagatcagaaggagactggtcaaggacagcaacacaaagaaggccggcaagacaggccccatgaaaaccctgctcgtcagagtgatgacccctgacctgagagagcggctggaaaacctgagaaagaagcccgagaacatccctcagcctatcagcaacaccagcagggccaacctgaacaagctgctgaccgactacaccgagatgaagaaagccatcctgcacgtgtactgggaagagttccagaaagaccccgtgggcctgatgagcagagttgctcagcccgctcctaagaacatcgaccagagaaagctgatccccgtgaaggacggcaacgagagactgacctctagcggctttgcctgcagccagtgttgccagcctctgtacgtgtacaagctggaacaagtgaacgacaagggcaagccccacaccaactacttcggcagatgcaacgtgtccgagcacgagaggctgatcctgctgtctcctcacaagcccgaggccaacgatgagctggtcacatacagcctgggcaagttcggacagagagccctggacttctacagcatccacgtgaccaaagaaagcacacaccccgtgaagcccctggctcagatcgccggcaatagatacgcctctggacctgtgggcaaagccctgtccgatgcctgcatgggaacaatcgccagcttcctgagcaagtaccaggacatcatcatcgagcaccagaaggtggtcaagggcaaccagaagagactggaaagcctgagggagctggccggcaaagagaacctggaataccccagcgtgaccctgcctcctcagcctcacacaaaagaaggcgtggacgcctacaacgaagtgatcgccagagtgagaatgtgggtcaacctgaacctgtggcagaagctgaaactgtccagggacgacgccaagcctctgctgagactgaagggcttccctagcttccctctggtggaaagacaggccaatgaagtggattggtgggacatggtctgcaacgtgaagaagctgatcaacgagaagaaagaggatggcaaggttttctggcagaacctggccggctacaagagacaagaagccctgaggccttacctgagcagcgaagaggaccggaagaagggcaagaagttcgccagataccagctgggcgacctgctgctgcacctggaaaagaagcacggcgaggactggggcaaagtgtacgatgaggcctgggagagaatcgacaagaaggtggaaggcctgagcaagcacattaagctggaagaggaaagaaggagcgaggacgcccaatctaaagccgctctgaccgattggctgagagccaaggccagctttgtgatcgagggcctgaaagaggccgacaaggacgagttctgcagatgcgagctgaagctgcagaagtggtacggcgatctgagaggcaagcccttcgccattgaggccgagaacagcatcctggacatcagcggcttcagcaagcagtacaactgcgccttcatttggcagaaagacggcgtcaagaaactgaacctgtacctgatcatcaattacttcaaaggcggcaagctgcggttcaagaagatcaaacccgaggccttcgaggctaacagattctacaccgtgatcaacaaaaagtccggcgagatcgtgcccatggaagtgaacttcaacttcgacgaccccaacctgattatcctgcctctggccttcggcaagagacagggcagagagttcatctggaacgatctgctgagcctggaaaccggctctctgaagctggccaatggcagagtgatcgagaaaaccctgtacaacaggagaaccagacaggacgagcctgctctgtttgtggccctgaccttcgagagaagagaggtgctggacagcagcaacatcaagcccatgaacctgatcggcgtggaccggggcgagaatatccctgctgtgatcgccctgacagaccctgaaggatgcccactgagcagattcaaggactccctgggcaaccctacacacatcctgagaatcggcgagagctacaaagagaagcagaggacaatccaggccaagaaagaggtggaacagagaagagccggcggatactctaggaagtacgccagcaaggccaagaatctggccgacgacatggtccgaaacaccgccagagatctgctgtactacgccgtgacacaggacgccatgctgatcttcgagaatctgagcagaggcttcggccggcagggcaagagaacctttatggccgagaggcagtacaccagaatggaagattggctcacagctaaactggcctacgagggactgagcaagacctacctgtccaaaacactggcccagtatacctccaagacctgcagcaattgcggcttcaccatcaccagcgccgactacgacagagtgctggaaaagctcaagaaaaccgccaccggctggatgaccaccatcaacggcaaagagctgaaggttgagggccagatcacctactacaacaggtacaagaggcagaacgtcgtgaaggatctgagcgtggaactggacagactgagcgaagagagcgtgaacaacgacatcagcagctggacaaagggcagatcaggcgaggctctgagcctgctgaagaagaggtttagccacagacctgtgcaagagaagttcgtgtgcctgaactgcggcttcgagacacacgccgatgaacaggctgccctgaacattgccagaagctggctgttcctgagaagccaagagtacaagaagtaccagaccaacaagaccaccggcaacaccgacaagagggcctttgtggaaacctggcagagcttctacagaaaaaagctgaaagaagtctggaagcccgccgtgactagtccaaaaaagaagagaaaggta

SEQ ID NO: 480 - protein, 996 aa, Artificial Sequence
  CasX Variant 487
MAPKKKRKVSRQEIKRINKIRRRLVKDSNTKKAGKTGPMKTLLVRVMTPDLRERLENLRKKPENIPQPISNTSRANLNKLLTDYTEMKKAILHVYWEEFQKDPVGLMSRVAQPAPKNIDQRKLIPVKDGNERLTSSGFACSQCCQPLYVYKLEQVNDKGKPHTNYFGRCNVSEHERLILLSPHKPEANDELVTYSLGKFGQRALDFYSIHVTKESTHPVKPLAQIAGNRYASGPVGKALSDACMGTIASFLSKYQDIIIEHQKVVKGNQKRLESLRELAGKENLEYPSVTLPPQPHTKEGVDAYNEVIARVRMWVNLNLWQKLKLSRDDAKPLLRLKGFPSFPLVERQANEVDWWDMVCNVKKLINEKKEDGKVFWQNLAGYKRQEALRPYLSSEEDRKKGKKFARYQLGDLLLHLEKKHGEDWGKVYDEAWERIDKKVEGLSKHIKLEEERRSEDAQSKAALTDWLRAKASFVIEGLKEADKDEFCRCELKLQKWYGDLRGKPFAIEAENSILDISGFSKQYNCAFIWQKDGVKKLNLYLIINYFKGGKLRFKKIKPEAFEANRFYTVINKKSGEIVPMEVNFNFDDPNLIILPLAFGKRQGREFIWNDLLSLETGSLKLANGRVIEKTLYNRRTRQDEPALFVALTFERREVLDSSNIKPMNLIGVDRGENIPAVIALTDPEGCPLSRFKDSLGNPTHILRIGESYKEKQRTIQAKKEVEQRRAGGYSRKYASKAKNLADDMVRNTARDLLYYAVTQDAMLIFENLSRGFGRQGKRTFMAERQYTRMEDWLTAKLAYEGLSKTYLSKTLAQYTSKTCSNCGFTITSADYDRVLEKLKKTATGWMTTINGKELKVEGQITYYNRYKRQNVVKDLSVELDRLSEESVNNDISSWTKGRSGEALSLLKKRFSHRPVQEKFVCLNCGFETHADEQAALNIARSWLFLRSQEYKKYQTNKTTGNTDKRAFVETWQSFYRKKLKEVWKPAVTSPKKKRKV

SEQ ID NO: 481 - DNA, 2991 bp, Artificial Sequence
  CasX Variant 488
atggccccaaagaagaagcggaaggtctctagacaagagatcaagagaatcaacaagatcagaaggagactggtcaaggacagcaacacaaagaaggccggcaagacaggccccatgaaaaccctgctcgtcagagtgatgacccctgacctgagagagcggctggaaaacctgagaaagaagcccgagaacatccctcagcctatcagcaacaccagcagggccaacctgaacaagctgctgaccgactacaccgagatgaagaaagccatcctgcacgtgtactgggaagagttccagaaagaccccgtgggcctgatgagcagagttgctcagcctgccagcaagaagatcgaccagaacaagctgaagcccgagatggacgagaagggcaatctgaccacagccggctttgcctgctctcagtgtggccagcctctgttcgtgtacaagctggaacaggtgtccgagaaaggcaaggcctacaccaactacttcggcagatgtaacgtggccgagcacgagaagctgattctgctggcccagctgaaacctgagaaggactctgatgaggccgtgacctacagcctgggcaagtttggacagagagccctggacttctacagcatccacgtgaccaaagaaagcacacaccccgtgaagcccctggctcagatcgccggcaatagatacgcctctggacctgtgggcaaagccctgtccgatgcctgcatgggaacaatcgccagcttcctgagcaagtaccaggacatcatcatcgagcaccagaaggtggtcaagggcaaccagaagagactggaaagcctgagggagctggccggcaaagagaacctggaataccccagcgtgaccctgcctcctcagcctcacacaaaagaaggcgtggacgcctacaacgaagtgatcgccagagtgagaatgtgggtcaacctgaacctgtggcagaagctgaaactgtccagggacgacgccaagcctctgctgagactgaagggcttccctagcttccctctggtggaaagacaggccaatgaagtggattggtgggacatggtctgcaacgtgaagaagctgatcaacgagaagaaagaggatggcaaggttttctggcagaacctggccggctacaagagacaagaagccctgaggccttacctgagcagcgaagaggaccggaagaagggcaagaagttcgccagataccagttcggcgacctgctgctgcacctggaaaagaagcacggcgaggactggggcaaagtgtacgatgaggcctgggagagaatcgacaagaaggtggaaggcctgagcaagcacattaagctggaagaggaaagaaggagcgaggacgcccaatctaaagccgctctgaccgattggctgagagccaaggccagctttgtgatcgagggcctgaaagaggccgacaaggacgagttctgcagatgcgagctgaagctgcagaagtggtacggcgatctgagaggcaagcccttcgccattgaggccgagaacagcatcctggacatcagcggcttcagcaagcagtacaactgcgccttcatttggcagaaagacggcgtcaagaaactgaacctgtacctgatcatcaattacttcaaaggcggcaagctgcggttcaagaagatcaaacccgaggccttcgaggctaacagattctacaccgtgatcaacaaaaagtccggcgagatcgtgcccatggaagtgaacttcaacttcgacgaccccaacctgattatcctgcctctggccttcggcaagagacagggcagagagttcatctggaacgatctgctgagcctggaaaccggctctctgaagctggccaatggcagagtgatcgagaaaaccctgtacaacaggagaaccagacaggacgagcctgctctgtttgtggccctgaccttcgagagaagagaggtgctggacagcagcaacatcaagcccatgaacctgatcggcatcgaccggggcgagaatatccctgctgtgatcgccctgacagaccctgaaggatgcccactgagcagattcaaggactccctgggcaaccctacacacatcctgagaatcggcgagagctacaaagagaagcagaggacaatccaggccaagaaagaggtggaacagagaagagccggcggatactctaggaagtacgccagcaaggccaagaatctggccgacgacatggtccgaaacaccgccagagatctgctgtactacgccgtgacacaggacgccatgctgatcttcgagaatctgagcagaggcttcggccggcagggcaagagaacctttatggccgagaggcagtacaccagaatggaagattggctcacagctaaactggcctacgagggactgagcaagacctacctgtccaaaacactggcccagtatacctccaagacctgcagcaattgcggcttcaccatcaccagcgccgactacgacagagtgctggaaaagctcaagaaaaccgccaccggctggatgaccaccatcaacggcaaagagctgaaggttgagggccagatcacctactacaacaggtacaagaggcagaacgtcgtgaaggatctgagcgtggaactggacagactgagcgaagagagcgtgaacaacgacatcagcagctggacaaagggcagatcaggcgaggctctgagcctgctgaagaagaggtttagccacagacctgtgcaagagaagttcgtgtgcctgaactgcggcttcgagacacacgccgatgaacaggctgccctgaacattgccagaagctggctgttcctgagaagccaagagtacaagaagtaccagaccaacaagaccaccggcaacaccgacaagagggcctttgtggaaacctggcagagcttctacagaaaaaagctgaaagaagtctggaagcccgccgtgactagtccaaaaaagaagagaaaggta

SEQ ID NO: 482 - protein, 997 aa, Artificial Sequence
  CasX Variant 488
MAPKKKRKVSRQEIKRINKIRRRLVKDSNTKKAGKTGPMKTLLVRVMTPDLRERLENLRKKPENIPQPISNTSRANLNKLLTDYTEMKKAILHVYWEEFQKDPVGLMSRVAQPASKKIDQNKLKPEMDEKGNLTTAGFACSQCGQPLFVYKLEQVSEKGKAYTNYFGRCNVAEHEKLILLAQLKPEKDSDEAVTYSLGKFGQRALDFYSIHVTKESTHPVKPLAQIAGNRYASGPVGKALSDACMGTIASFLSKYQDIIIEHQKVVKGNQKRLESLRELAGKENLEYPSVTLPPQPHTKEGVDAYNEVIARVRMWVNLNLWQKLKLSRDDAKPLLRLKGFPSFPLVERQANEVDWWDMVCNVKKLINEKKEDGKVFWQNLAGYKRQEALRPYLSSEEDRKKGKKFARYQFGDLLLHLEKKHGEDWGKVYDEAWERIDKKVEGLSKHIKLEEERRSEDAQSKAALTDWLRAKASFVIEGLKEADKDEFCRCELKLQKWYGDLRGKPFAIEAENSILDISGFSKQYNCAFIWQKDGVKKLNLYLIINYFKGGKLRFKKIKPEAFEANRFYTVINKKSGEIVPMEVNFNFDDPNLIILPLAFGKRQGREFIWNDLLSLETGSLKLANGRVIEKTLYNRRTRQDEPALFVALTFERREVLDSSNIKPMNLIGIDRGENIPAVIALTDPEGCPLSRFKDSLGNPTHILRIGESYKEKQRTIQAKKEVEQRRAGGYSRKYASKAKNLADDMVRNTARDLLYYAVTQDAMLIFENLSRGFGRQGKRTFMAERQYTRMEDWLTAKLAYEGLSKTYLSKTLAQYTSKTCSNCGFTITSADYDRVLEKLKKTATGWMTTINGKELKVEGQITYYNRYKRQNVVKDLSVELDRLSEESVNNDISSWTKGRSGEALSLLKKRFSHRPVQEKFVCLNCGFETHADEQAALNIARSWLFLRSQEYKKYQTNKTTGNTDKRAFVETWQSFYRKKLKEVWKPAVTSPKKKRKV

SEQ ID NO: 483 - DNA, 2991 bp, Artificial Sequence
  CasX Variant 489
atggccccaaagaagaagcggaaggtctctagacaagagatcaagagaatcaacaagatcagaaggagactggtcaaggacagcaacacaaagaaggccggcaagacaggccccatgaaaaccctgctcgtcagagtgatgacccctgacctgagagagcggctggaaaacctgagaaagaagcccgagaacatccctcagcctatcagcaacaccagcagggccaacctgaacaagctgctgaccgactacaccgagatgaagaaagccatcctgcacgtgtactgggaagagttccagaaagaccccgtgggcctgatgagcagagttgctcagcctgccagcaagaagatcgaccagaacaagctgaagcccgagatggacgagaagggcaatctgaccacagccggctttgcctgctctcagtgtggccagcctctgttcgtgtacaagctggaacaggtgtccgagaaaggcaaggcctacaccaactacttcggcagatgtaacgtggccgagcacgagaagctgattctgctggcccagctgaaacctgagaaggactctgatgaggccgtgacctacagcctgggcaagtttggacagagagccctggacttctacagcatccacgtgaccaaagaaagcacacaccccgtgaagcccctggctcagatcgccggcaatagatacgcctctggacctgtgggcaaagccctgtccgatgcctgcatgggaacaatcgccagcttcctgagcaagtaccaggacatcatcatcgagcaccagaaggtggtcaagggcaaccagaagagactggaaagcctgagggagctggccggcaaagagaacctggaataccccagcgtgaccctgcctcctcagcctcacacaaaagaaggcgtggacgcctacaacgaagtgatcgccagagtgagaatgtgggtcaacctgaacctgtggcagaagctgaaactgtccagggacgacgccaagcctctgctgagactgaagggcttccctagcttccctctggtggaaagacaggccaatgaagtggattggtgggacatggtctgcaacgtgaagaagctgatcaacgagaagaaagaggatggcaaggttttctggcagaacctggccggctacaagagacaagaagccctgaggccttacctgagcagcgaagaggaccggaagaagggcaagaagttcgccagataccagctgggcgacctgctgctgcacctggaaaagaagcacggcgaggactggggcaaagtgtacgatgaggcctgggagagaatcgacaagaaggtggaaggcctgagcaagcacattaagctggaagaggaaagaaggagcgaggacgcccaatctaaagccgctctgaccgattggctgagagccaaggccagctttgtgatcgagggcctgaaagaggccgacaaggacgagttctgcagatgcgagctgaagctgcagaagtggtacggcgatctgagaggcaagcccttcgccattgaggccgagaacagcatcctggacatcagcggcttcagcaagcagtacaactgcgccttcatttggcagaaagacggcgtcaagaaactgaacctgtacctgatcatcaattacttcaaaggcggcaagctgcggttcaagaagatcaaacccgaggccttcgaggctaacagattctacaccgtgatcaacaaaaagtccggcgagatcgtgcccatggaagtgaacttcaacttcgacgaccccaacctgattatcctgcctctggccttcggcaagagacagggcagagagttcatctggaacgatctgctgagcctggaaaccggctctctgaagctggccaatggcagagtgatcgagaaaaccctgtacaacaggagaaccagacaggacgagcctgctctgtttgtggccctgaccttcgagagaagagaggtgctggacagcagcaacatcaagcccatgaacctgatcggcgtggaccggggcgagaatatccctgctgtgatcgccctgacagaccctgaaggatgcccactgagcagattcaaggactccctgggcaaccctacacacatcctgagaatcggcgagagctacaaagagaagcagaggacaatccaggccaagaaagaggtggaacagagaagagccggcggatactctaggaagtacgccagcaaggccaagaatctggccgacgacatggtccgaaacaccgccagagatctgctgtactacgccgtgacacaggacgccatgctgatcttcgagaatctgagcagaggcttcggccggcagggcaagagaacctttatggccgagaggcagtacaccagaatggaagattggctcacagctaaactggcctacgagggactgagcaagacctacctgtccaaaacactggcccagtatacctccaagacctgcagcaattgcggcttcaccatcaccagcgccgactacgacagagtgctggaaaagctcaagaaaaccgccaccggctggatgaccaccatcaacggcaaagagctgaaggttgagggccagatcacctactacaacaggaggaagaggcagaacgtcgtgaaggatctgagcgtggaactggacagactgagcgaagagagcgtgaacaacgacatcagcagctggacaaagggcagatcaggcgaggctctgagcctgctgaagaagaggtttagccacagacctgtgcaagagaagttcgtgtgcctgaactgcggcttcgagacacacgccgatgaacaggctgccctgaacattgccagaagctggctgttcctgagaagccaagagtacaagaagtaccagaccaacaagaccaccggcaacaccgacaagagggcctttgtggaaacctggcagagcttctacagaaaaaagctgaaagaagtctggaagcccgccgtgactagtccaaaaaagaagagaaaggta

SEQ ID NO: 484 - protein, 997 aa, Artificial Sequence
  CasX Variant 489
MAPKKKRKVSRQEIKRINKIRRRLVKDSNTKKAGKTGPMKTLLVRVMTPDLRERLENLRKKPENIPQPISNTSRANLNKLLTDYTEMKKAILHVYWEEFQKDPVGLMSRVAQPASKKIDQNKLKPEMDEKGNLTTAGFACSQCGQPLFVYKLEQVSEKGKAYTNYFGRCNVAEHEKLILLAQLKPEKDSDEAVTYSLGKFGQRALDFYSIHVTKESTHPVKPLAQIAGNRYASGPVGKALSDACMGTIASFLSKYQDIIIEHQKVVKGNQKRLESLRELAGKENLEYPSVTLPPQPHTKEGVDAYNEVIARVRMWVNLNLWQKLKLSRDDAKPLLRLKGFPSFPLVERQANEVDWWDMVCNVKKLINEKKEDGKVFWQNLAGYKRQEALRPYLSSEEDRKKGKKFARYQLGDLLLHLEKKHGEDWGKVYDEAWERIDKKVEGLSKHIKLEEERRSEDAQSKAALTDWLRAKASFVIEGLKEADKDEFCRCELKLQKWYGDLRGKPFAIEAENSILDISGFSKQYNCAFIWQKDGVKKLNLYLIINYFKGGKLRFKKIKPEAFEANRFYTVINKKSGEIVPMEVNFNFDDPNLIILPLAFGKRQGREFIWNDLLSLETGSLKLANGRVIEKTLYNRRTRQDEPALFVALTFERREVLDSSNIKPMNLIGVDRGENIPAVIALTDPEGCPLSRFKDSLGNPTHILRIGESYKEKQRTIQAKKEVEQRRAGGYSRKYASKAKNLADDMVRNTARDLLYYAVTQDAMLIFENLSRGFGRQGKRTFMAERQYTRMEDWLTAKLAYEGLSKTYLSKTLAQYTSKTCSNCGFTITSADYDRVLEKLKKTATGWMTTINGKELKVEGQITYYNRRKRQNVVKDLSVELDRLSEESVNNDISSWTKGRSGEALSLLKKRFSHRPVQEKFVCLNCGFETHADEQAALNIARSWLFLRSQEYKKYQTNKTTGNTDKRAFVETWQSFYRKKLKEVWKPAVTSPKKKRKV

SEQ ID NO: 485 - DNA, 2991 bp, Artificial Sequence
  CasX Variant 490
atggccccaaagaagaagcggaaggtctctagacaagagatcaagagaatcaacaagatcagaaggagactggtcaaggacagcaacacaaagaaggccggcaagacaggccccatgaaaaccctgctcgtcagagtgatgacccctgacctgagagagcggctggaaaacctgagaaagaagcccgagaacatccctcagcctatcagcaacaccagcagggccaacctgaacaagctgctgaccgactacaccgagatgaagaaagccatcctgcacgtgtactgggaagagttccagaaagaccccgtgggcctgatgagcagagttgctcagcctgccagcaagaagatcgaccagaacaagctgaagcccgagatggacgagaagggcaatctgaccacagccggctttgcctgctctcagtgtggccagcctctgttcgtgtacaagctggaacaggtgtccgagaaaggcaaggcctacaccaactacttcggcagatgtaacgtggccgagcacgagaagctgattctgctggcccagctgaaacctgagaaggactctgatgaggccgtgacctacagcctgggcaagtttggacagagagccctggacttctacagcatccacgtgaccaaagaaagcacacaccccgtgaagcccctggctcagatcgccggcaatagatacgcctctggacctgtgggcaaagccctgtccgatgcctgcatgggaacaatcgccagcttcctgagcaagtaccaggacatcatcatcgagcaccagaaggtggtcaagggcaaccagaagagactggaaagcctgagggagctggccggcaaagagaacctggaataccccagcgtgaccctgcctcctcagcctcacacaaaagaaggcgtggacgcctacaacgaagtgatcgccagagtgagaatgtgggtcaacctgaacctgtggcagaagctgaaactgtccagggacgacgccaagcctctgctgagactgaagggcttccctagcttccctctggtggaaagacaggccaatgaagtggattggtgggacatggtctgcaacgtgaagaagctgatcaacgagaagaaagaggatggcaaggttttctggcagaacctggccggctacaagagacaagaagccctgaggccttacctgagcagcgaagaggaccggaagaagggcaagaagttcgccagataccagctgggcgacctgctgaagcacctggaaaagaagcacggcgaggactggggcaaagtgtacgatgaggcctgggagagaatcgacaagaaggtggaaggcctgagcaagcacattaagctggaagaggaaagaaggagcgaggacgcccaatctaaagccgctctgaccgattggctgagagccaaggccagctttgtgatcgagggcctgaaagaggccgacaaggacgagttctgcagatgcgagctgaagctgcagaagtggtacggcgatctgagaggcaagcccttcgccattgaggccgagaacagcatcctggacatcagcggcttcagcaagcagtacaactgcgccttcatttggcagaaagacggcgtcaagaaactgaacctgtacctgatcatcaattacttcaaaggcggcaagctgcggttcaagaagatcaaacccgaggccttcgaggctaacagattctacaccgtgatcaacaaaaagtccggcgagatcgtgcccatggaagtgaacttcaacttcgacgaccccaacctgattatcctgcctctggccttcggcaagagacagggcagagagttcatctggaacgatctgctgagcctggaaaccggctctctgaagctggccaatggcagagtgatcgagaaaaccctgtacaacaggagaaccagacaggacgagcctgctctgtttgtggccctgaccttcgagagaagagaggtgctggacagcagcaacatcaagcccatgaacctgatcggcgtggaccggggcgagaatatccctgctgtgatcgccctgacagaccctgaaggatgcccactgagcagattcaaggactccctgggcaaccctacacacatcctgagaatcggcgagagctacaaagagaagcagaggacaatccaggccaagaaagaggtggaacagagaagagccggcggatactctaggaagtacgccagcaaggccaagaatctggccgacgacatggtccgaaacaccgccagagatctgctgtactacgccgtgacacaggacgccatgctgatcttcgagaatctgagcagaggcttcggccggcagggcaagagaacctttatggccgagaggcagtacaccagaatggaagattggctcacagctaaactggcctacgagggactgagcaagacctacctgtccaaaacactggcccagtatacctccaagacctgcagcaattgcggcttcaccatcaccagcgccgactacgacagagtgctggaaaagctcaagaaaaccgccaccggctggatgaccaccatcaacggcaaagagctgaaggttgagggccagatcacctactacaacaggaggaagaggcagaacgtcgtgaaggatctgagcgtggaactggacagactgagcgaagagagcgtgaacaacgacatcagcagctggacaaagggcagatcaggcgaggctctgagcctgctgaagaagaggtttagccacagacctgtgcaagagaagttcgtgtgcctgaactgcggcttcgagacacacgccgatgaacaggctgccctgaacattgccagaagctggctgttcctgagaagccaagagtacaagaagtaccagaccaacaagaccaccggcaacaccgacaagagggcctttgtggaaacctggcagagcttctacagaaaaaagctgaaagaagtctggaagcccgccgtgactagtccaaaaaagaagagaaaggta

SEQ ID NO: 486 - protein, 997 aa, Artificial Sequence
  CasX Variant 490
MAPKKKRKVSRQEIKRINKIRRRLVKDSNTKKAGKTGPMKTLLVRVMTPDLRERLENLRKKPENIPQPISNTSRANLNKLLTDYTEMKKAILHVYWEEFQKDPVGLMSRVAQPASKKIDQNKLKPEMDEKGNLTTAGFACSQCGQPLFVYKLEQVSEKGKAYTNYFGRCNVAEHEKLILLAQLKPEKDSDEAVTYSLGKFGQRALDFYSIHVTKESTHPVKPLAQIAGNRYASGPVGKALSDACMGTIASFLSKYQDIIIEHQKVVKGNQKRLESLRELAGKENLEYPSVTLPPQPHTKEGVDAYNEVIARVRMWVNLNLWQKLKLSRDDAKPLLRLKGFPSFPLVERQANEVDWWDMVCNVKKLINEKKEDGKVFWQNLAGYKRQEALRPYLSSEEDRKKGKKFARYQLGDLLKHLEKKHGEDWGKVYDEAWERIDKKVEGLSKHIKLEEERRSEDAQSKAALTDWLRAKASFVIEGLKEADKDEFCRCELKLQKWYGDLRGKPFAIEAENSILDISGFSKQYNCAFIWQKDGVKKLNLYLIINYFKGGKLRFKKIKPEAFEANRFYTVINKKSGEIVPMEVNFNFDDPNLIILPLAFGKRQGREFIWNDLLSLETGSLKLANGRVIEKTLYNRRTRQDEPALFVALTFERREVLDSSNIKPMNLIGVDRGENIPAVIALTDPEGCPLSRFKDSLGNPTHILRIGESYKEKQRTIQAKKEVEQRRAGGYSRKYASKAKNLADDMVRNTARDLLYYAVTQDAMLIFENLSRGFGRQGKRTFMAERQYTRMEDWLTAKLAYEGLSKTYLSKTLAQYTSKTCSNCGFTITSADYDRVLEKLKKTATGWMTTINGKELKVEGQITYYNRRKRQNVVKDLSVELDRLSEESVNNDISSWTKGRSGEALSLLKKRFSHRPVQEKFVCLNCGFETHADEQAALNIARSWLFLRSQEYKKYQTNKTTGNTDKRAFVETWQSFYRKKLKEVWKPAVTSPKKKRKV

SEQ ID NO: 487 - DNA, 2991 bp, Artificial Sequence
  CasX Variant 491
atggccccaaagaagaagcggaaggtctctagacaagagatcaagagaatcaacaagatcagaaggagactggtcaaggacagcaacacaaagaaggccggcaagacaggccccatgaaaaccctgctcgtcagagtgatgacccctgacctgagagagcggctggaaaacctgagaaagaagcccgagaacatccctcagcctatcagcaacaccagcagggccaacctgaacaagctgctgaccgactacaccgagatgaagaaagccatcctgcacgtgtactgggaagagttccagaaagaccccgtgggcctgatgagcagagttgctcagcctgccagcaagaagatcgaccagaacaagctgaagcccgagatggacgagaagggcaatctgaccacagccggctttgcctgctctcagtgtggccagcctctgttcgtgtacaagctggaacaggtgtccgagaaaggcaaggcctacaccaactacttcggcagatgtaacgtggccgagcacgagaagctgattctgctggcccagctgaaacctgagaaggactctgatgaggccgtgacctacagcctgggcaagtttggacagagagccctggacttctacagcatccacgtgaccaaagaaagcacacaccccgtgaagcccctggctcagatcgccggcaatagatacgcctctggacctgtgggcaaagccctgtccgatgcctgcatgggaacaatcgccagcttcctgagcaagtaccaggacatcatcatcgagcaccagaaggtggtcaagggcaaccagaagagactggaaagcctgagggagctggccggcaaagagaacctggaataccccagcgtgaccctgcctcctcagcctcacacaaaagaaggcgtggacgcctacaacgaagtgatcgccagagtgagaatgtgggtcaacctgaacctgtggcagaagctgaaactgtccagggacgacgccaagcctctgctgagactgaagggcttccctagcttccctctggtggaaagacaggccaatgaagtggattggtgggacatggtctgcaacgtgaagaagctgatcaacgagaagaaagaggatggcaaggttttctggcagaacctggccggctacaagagacaagaagccctgaggccttacctgagcagcgaagaggaccggaagaagggcaagaagttcgccagataccagctgggcgacctgctgctgcacctggaaaagaagcacggcgaggactggggcaaagtgtacgatgaggcctgggagagaatcgacaagaaggtggaaggcctgagcaagcacattaagctggaagaggaaagaaggagcgaggacgcccaatctaaagccgctctgaccgattggctgagagccaaggccagctttgtgatcgagggcctgaaagaggccgacaaggacgagttctgcagatgcgagctgaagctgcagaagtggtacggcgatctgagaggcaagcccttcgccattgaggccgagaacagcatcctggacatcagcggcttcagcaagcagtacaactgcgccttcatttggcagaaagacggcgtcaagaaactgaacctgtacctgatcatcaattacttcaaaggcggcaagctgcggttcaagaagatcaaacccgaggccttcgaggctaacagattctacaccgtgatcaacaaaaagtccggcgagatcgtgcccatggaagtgaacttcaacttcgacgaccccaacctgattatcctgcctctggccttcggcaagagacagggcagagagttcatctggaacgatctgctgagcctggaaaccggctctctgaagctggccaatggcagagtgatcgagaaaaccctgtacaacaggagaaccagacaggacgagcctgctctgtttgtggccctgaccttcgagagaagagaggtgctggacagcagcaacatcaagcccatgaacctgatcggcgtggaccggggcgagaatatccctgctgtgatcgccctgacagaccctgaaggatgcccactgagcagattcaaggactccctgggcaaccctacacacatcctgagaatcggcgagagctacaaagagaagcagaggacaatccaggccaagaaagaggtggaacagagaagagccggcggatactctaggaagtacgccagcaaggccaagaatctggccgacgacatggtccgaaacaccgccagagatctgctgtactacgccgtgacacaggacgccatgctgatcttcgagaatctgagcagaggcttcggccggcagggcaagagaacctttatggccgagaggcagtacaccagaatggaagattggctcacagctaaactggcctacgagggactgagcaagacctacctgtccaaaacactggcccagtatacctccaagacctgcagcaattgcggcttcaccatcaccagcgccgactacgacagagtgctggaaaagctcaagaaaaccgccaccggctggatgaccaccatcaacggcaaagagctgaaggttgagggccagatcacctactacaacaggtacaagaggcagaacgtcgtgaaggatctgagcgtggaactggacagactgagcgaagagagcgtgaacaacgacatcagcagctggacaaagggcagatcaggcgaggctctgagcctgctgaagaagaggtttagccacagacctgtgcaagagaagttcgtgtgcctgaactgcggcttcgagacacacgccgatgaacaggctgccctgaacattgccagaagctggctgttcctgagaagccaagagtacaagaagtaccagaccaacaagaccaccggcaacaccgacaagagggcctttgtggaaacctggcagagcttctacagaaaaaagctgaaagaagtctggaagcccgccgtgactagtccaaaaaagaagagaaaggta

SEQ ID NO: 488 - protein, 997 aa, Artificial Sequence
  CasX Variant 491
MAPKKKRKVSRQEIKRINKIRRRLVKDSNTKKAGKTGPMKTLLVRVMTPDLRERLENLRKKPENIPQPISNTSRANLNKLLTDYTEMKKAILHVYWEEFQKDPVGLMSRVAQPASKKIDQNKLKPEMDEKGNLTTAGFACSQCGQPLFVYKLEQVSEKGKAYTNYFGRCNVAEHEKLILLAQLKPEKDSDEAVTYSLGKFGQRALDFYSIHVTKESTHPVKPLAQIAGNRYASGPVGKALSDACMGTIASFLSKYQDIIIEHQKVVKGNQKRLESLRELAGKENLEYPSVTLPPQPHTKEGVDAYNEVIARVRMWVNLNLWQKLKLSRDDAKPLLRLKGFPSFPLVERQANEVDWWDMVCNVKKLINEKKEDGKVFWQNLAGYKRQEALRPYLSSEEDRKKGKKFARYQLGDLLLHLEKKHGEDWGKVYDEAWERIDKKVEGLSKHIKLEEERRSEDAQSKAALTDWLRAKASFVIEGLKEADKDEFCRCELKLQKWYGDLRGKPFAIEAENSILDISGFSKQYNCAFIWQKDGVKKLNLYLIINYFKGGKLRFKKIKPEAFEANRFYTVINKKSGEIVPMEVNFNFDDPNLIILPLAFGKRQGREFIWNDLLSLETGSLKLANGRVIEKTLYNRRTRQDEPALFVALTFERREVLDSSNIKPMNLIGVDRGENIPAVIALTDPEGCPLSRFKDSLGNPTHILRIGESYKEKQRTIQAKKEVEQRRAGGYSRKYASKAKNLADDMVRNTARDLLYYAVTQDAMLIFENLSRGFGRQGKRTFMAERQYTRMEDWLTAKLAYEGLSKTYLSKTLAQYTSKTCSNCGFTITSADYDRVLEKLKKTATGWMTTINGKELKVEGQITYYNRYKRQNVVKDLSVELDRLSEESVNNDISSWTKGRSGEALSLLKKRFSHRPVQEKFVCLNCGFETHADEQAALNIARSWLFLRSQEYKKYQTNKTTGNTDKRAFVETWQSFYRKKLKEVWKPAVTSPKKKRKV

SEQ ID NO: 489 - DNA, 2991 bp, Artificial Sequence
  CasX Variant 494
atggccccaaagaagaagcggaaggtctctagacaagagatcaagagaatcaacaagatcagaaggagactggtcaaggacagcaacacaaagaaggccggcaagacaggccccatgaaaaccctgctcgtcagagtgatgacccctgacctgagagagcggctggaaaacctgagaaagaagcccgagaacatccctcagcctatcagcaacaccagcagggccaacctgaacaagctgctgaccgactacaccgagatgaagaaagccatcctgcacgtgtactgggaagagttccagaaagaccccgtgggcctgatgagcagagttgctcagcctgccagcaagaagatcgaccagaacaagctgaagcccgagatggacgagaagggcaatctgaccacagccggctttgcctgctctcagtgtggccagcctctgttcgtgtacaagctggaacaggtgtccgagaaaggcaaggcctacaccaactacttcggcagatgtaacgtggccgagcacgagaagctgattctgctggcccagctgaaacctgagaaggactctgatgaggccgtgacctacagcctgggcaagtttggacagagagccctggacttctacagcatccacgtgaccagggagagcaatcaccctgtgaagcccctggaacagatcggcggcaatagctgtgcctctggacctgtgggaaaagccctgagcgacgcctgtatgggagccgtggcatccttcctgaccaagtaccaggacatcatcctggaacaccagaaagtgatcaagaagaacgagaaaagactggccaacctcaaggatatcgccagcgctaacggcctggcctttcctaagatcaccctgcctccacagcctcacaccaaagagggcatcgaggcctacaacaacgtggtggcccagatcgtgatttgggtcaacctgaatctgtggcagaagctgaagatcggcagggacgaagccaagccactgcagagactgaagggcttccctagcttccctctggtggaaagacaggccaatgaagtggattggtgggacatggtctgcaacgtgaagaagctgatcaacgagaagaaagaggatggcaaggttttctggcagaacctggccggctacaagagacaagaagccctgaggccttacctgagcagcgaagaggaccggaagaagggcaagaagttcgccagataccagctgggcgacctgctgctgcacctggaaaagaagcacggcgaggactggggcaaagtgtacgatgaggcctgggagagaatcgacaagaaggtggaaggcctgagcaagcacattaagctggaagaggaaagaaggagcgaggacgcccaatctaaagccgctctgaccgattggctgagagccaaggccagctttgtgatcgagggcctgaaagaggccgacaaggacgagttctgcagatgcgagctgaagctgcagaagtggtacggcgatctgagaggcaagcccttcgccattgaggccgagaacagcatcctggacatcagcggcttcagcaagcagtacaactgcgccttcatttggcagaaagacggcgtcaagaaactgaacctgtacctgatcatcaattacttcaaaggcggcaagctgcggttcaagaagatcaaacccgaggccttcgaggctaacagattctacaccgtgatcaacaaaaagtccggcgagatcgtgcccatggaagtgaacttcaacttcgacgaccccaacctgattatcctgcctctggccttcggcaagagacagggcagagagttcatctggaacgatctgctgagcctggaaaccggctctctgaagctggccaatggcagagtgatcgagaaaaccctgtacaacaggagaaccagacaggacgagcctgctctgtttgtggccctgaccttcgagagaagagaggtgctggacagcagcaacatcaagcccatgaacctgatcggcgtggaccggggcgagaatatccctgctgtgatcgccctgacagaccctgaaggatgcccactgagcagattcaaggactccctgggcaaccctacacacatcctgagaatcggcgagagctacaaagagaagcagaggacaatccaggccaagaaagaggtggaacagagaagagccggcggatactctaggaagtacgccagcaaggccaagaatctggccgacgacatggtccgaaacaccgccagagatctgctgtactacgccgtgacacaggacgccatgctgatcttcgagaatctgagcagaggcttcggccggcagggcaagagaacctttatggccgagaggcagtacaccagaatggaagattggctcacagctaaactggcctacgagggactgagcaagacctacctgtccaaaacactggcccagtatacctccaagacctgcagcaattgcggcttcaccatcaccagcgccgactacgacagagtgctggaaaagctcaagaaaaccgccaccggctggatgaccaccatcaacggcaaagagctgaaggttgagggccagatcacctactacaacaggtacaagaggcagaacgtcgtgaaggatctgagcgtggaactggacagactgagcgaagagagcgtgaacaacgacatcagcagctggacaaagggcagatcaggcgaggctctgagcctgctgaagaagaggtttagccacagacctgtgcaagagaagttcgtgtgcctgaactgcggcttcgagacacacgccgatgaacaggctgccctgaacattgccagaagctggctgttcctgagaagccaagagtacaagaagtaccagaccaacaagaccaccggcaacaccgacaagagggcctttgtggaaacctggcagagcttctacagaaaaaagctgaaagaagtctggaagcccgccgtgactagtccaaaaaagaagagaaaggta

SEQ ID NO: 490 - protein, 997 aa, Artificial Sequence
  CasX Variant 494
MAPKKKRKVSRQEIKRINKIRRRLVKDSNTKKAGKTGPMKTLLVRVMTPDLRERLENLRKKPENIPQPISNTSRANLNKLLTDYTEMKKAILHVYWEEFQKDPVGLMSRVAQPASKKIDQNKLKPEMDEKGNLTTAGFACSQCGQPLFVYKLEQVSEKGKAYTNYFGRCNVAEHEKLILLAQLKPEKDSDEAVTYSLGKFGQRALDFYSIHVTRESNHPVKPLEQIGGNSCASGPVGKALSDACMGAVASFLTKYQDIILEHQKVIKKNEKRLANLKDIASANGLAFPKITLPPQPHTKEGIEAYNNVVAQIVIWVNLNLWQKLKIGRDEAKPLQRLKGFPSFPLVERQANEVDWWDMVCNVKKLINEKKEDGKVFWQNLAGYKRQEALRPYLSSEEDRKKGKKFARYQLGDLLLHLEKKHGEDWGKVYDEAWERIDKKVEGLSKHIKLEEERRSEDAQSKAALTDWLRAKASFVIEGLKEADKDEFCRCELKLQKWYGDLRGKPFAIEAENSILDISGFSKQYNCAFIWQKDGVKKLNLYLIINYFKGGKLRFKKIKPEAFEANRFYTVINKKSGEIVPMEVNFNFDDPNLIILPLAFGKRQGREFIWNDLLSLETGSLKLANGRVIEKTLYNRRTRQDEPALFVALTFERREVLDSSNIKPMNLIGVDRGENIPAVIALTDPEGCPLSRFKDSLGNPTHILRIGESYKEKQRTIQAKKEVEQRRAGGYSRKYASKAKNLADDMVRNTARDLLYYAVTQDAMLIFENLSRGFGRQGKRTFMAERQYTRMEDWLTAKLAYEGLSKTYLSKTLAQYTSKTCSNCGFTITSADYDRVLEKLKKTATGWMTTINGKELKVEGQITYYNRYKRQNVVKDLSVELDRLSEESVNNDISSWTKGRSGEALSLLKKRFSHRPVQEKFVCLNCGFETHADEQAALNIARSWLFLRSQEYKKYQTNKTTGNTDKRAFVETWQSFYRKKLKEVWKPAVTSPKKKRKV

SEQ ID NO: 491 - DNA, 22 bp, Artificial Sequence
  T7 promoter primer
gaaattaatacgactcactata

SEQ ID NO: 492 - DNA, 87 bp, Artificial Sequence
  sg2 backbone fwd primer
gaaattaatacgactcactataggtactggcgcttttatctcattactttgagagccatcaccagcgactatgtcgtatgggtaaag

SEQ ID NO: 493 - DNA, 78 bp, Artificial Sequence
  sg2 backbone rev primer
ctttgatgcttcttatttatcggatttctctccgataaataagcgctttacccatacgacatagtcgctggtgatggc

SEQ ID NO: 494 - DNA, 54 bp, Artificial Sequence
  sg2.7.37 spacer primer
cggagcgagacatctcggccctttgatgcttcttatttatcggatttctctccg

SEQ ID NO: 495 - DNA, 90 bp, Artificial Sequence
  sg32 backbone fwd primer
gaaattaatacgactcactataggtactggcgcttttatctcattactttgagagccatcaccagcgactatgtcgtatgggtaaagcgc

SEQ ID NO: 496 - DNA, 46 bp, Artificial Sequence
  sg32 backbone rev primer
ctttgatgcttccctccgaagagggcgctttacccatacgacatag

SEQ ID NO: 497 - DNA, 43 bp, Artificial Sequence
  sg32.7.37 spacer primer
cggagcgagacatctcggccctttgatgcttccctccgaagag

SEQ ID NO: 498 - DNA, 90 bp, Artificial Sequence
  sg64 backbone fwd primer
gaaattaatacgactcactataggtactggcgcctttatctcattactttgagagccatcaccagcgactatgtcgtatgggtaaagcgc

SEQ ID NO: 499 - DNA, 54 bp, Artificial Sequence
  sg64 backbone rev primer
ctttgatgcttcttacggaccgaagtccgtaagcgctttacccatacgacatag

SEQ ID NO: 500 - DNA, 45 bp, Artificial Sequence
  sg64.7.37 spacer primer
cggagcgagacatctcggccctttgatgcttcttacggaccgaag

SEQ ID NO: 501 - DNA, 87 bp, Artificial Sequence
  sg174 backbone fwd primer
gaaattaatacgactcactataactggcgcttttatctgattactttgagagccatcaccagcgactatgtcgtagtgggtaaagct

SEQ ID NO: 502 - DNA, 50 bp, Artificial Sequence
  sg174 backbone rev primer
ctttgatgctccctccgaagagggagctttacccactacgacatagtcgc

SEQ ID NO: 503 - DNA, 36 bp, Artificial Sequence
  sg174.7.37 spacer primer
cggagcgagacatctcggccctttgatgctccctcc

SEQ ID NO: 504 - RNA, 130 nt, Artificial Sequence
  guide RNA
gguacuggcgcuuuuaucucauuacuuugagagccaucaccagcgacuaugucguauggguaaagcgcuuauuuaucggagagaaauccgauaaauaagaagcaucaaagggccgagaugucucgcuccg

SEQ ID NO: 505 - RNA, 107 nt, Artificial Sequence
  guide RNA
gguacuggcgcuuuuaucucauuacuuugagagccaucaccagcgacuaugucguauggguaaagcgcccucuucggagggaagcaucaaagggccgagaugucucg

SEQ ID NO: 506 - RNA, 120 nt, Artificial Sequence
  guide RNA
gguacuggcgccuuuaucucauuacuuugagagccaucaccagcgacuaugucguauggguaaagcgcuuacggacuucgguccguaagaagcaucaaagggccgagaugucucgcuccg

SEQ ID NO: 507 - RNA, 109 nt, Artificial Sequence
  guide RNA
acuggcgcuuuuaucugauuacuuugagagccaucaccagcgacuaugucguaguggguaaagcucccucuucggagggagcaucaaagggccgagaugucucgcuccg

SEQ ID NO: 508 - DNA, 20 bp, Artificial Sequence
  spacer sequence
gaggaggacggcctggccga

SEQ ID NO: 509 - DNA, 20 bp, Artificial Sequence
  spacer sequence
accgctgcgccaaggtgcgg

SEQ ID NO: 510 - DNA, 20 bp, Artificial Sequence
  spacer sequence
gccaggccgtcctcctcgga

SEQ ID NO: 511 - DNA, 20 bp, Artificial Sequence
  spacer sequence
gtgctcgggtgcttcggcca

SEQ ID NO: 512 - DNA, 20 bp, Artificial Sequence
  spacer sequence
atggccttcttcctggcttc

SEQ ID NO: 513 - DNA, 20 bp, Artificial Sequence
  spacer sequence
gcaccaccacgtaggtgcca

SEQ ID NO: 514 - DNA, 20 bp, Artificial Sequence
  spacer sequence
tcctggcttcctggtgaaga

SEQ ID NO: 515 - DNA, 20 bp, Artificial Sequence
  spacer sequence
tggcttcctggtgaagatga

SEQ ID NO: 516 - DNA, 20 bp, Artificial Sequence
  spacer sequence
ccaggaagccaggaagaagg

SEQ ID NO: 517 - DNA, 20 bp, Artificial Sequence
  spacer sequence
tccttgcatggggccaggat

SEQ ID NO: 518 - DNA, 20 bp, Artificial Sequence
  spacer sequence
ggcggcaagttctgctcagc

SEQ ID NO: 519 - DNA, 20 bp, Artificial Sequence
  spacer sequence
tctccacgatcgtcagcgtg

SEQ ID NO: 520 - DNA, 20 bp, Artificial Sequence
  spacer sequence
acgatcgtcagcgtgagtgc

SEQ ID NO: 521 - DNA, 20 bp, Artificial Sequence
  spacer sequence
ctctagcaatggatcgtggg

SEQ ID NO: 522 - DNA, 20 bp, Artificial Sequence
  spacer sequence
caaacaaatgtgtcacaaag

SEQ ID NO: 523 - DNA, 20 bp, Artificial Sequence
  spacer sequence
gatgtgtatatcacagacaa

SEQ ID NO: 524 - DNA, 20 bp, Artificial Sequence
  spacer sequence
ggaataatgctgttgttgaa

SEQ ID NO: 525 - DNA, 20 bp, Artificial Sequence
  spacer sequence
aaatccagtgacaagtctgt

SEQ ID NO: 526 - DNA, 20 bp, Artificial Sequence
  spacer sequence
aggccacagcactgttgctc

SEQ ID NO: 527 - DNA, 20 bp, Artificial Sequence
  spacer sequence
agaagacaccttcttcccca

SEQ ID NO: 528 - DNA, 20 bp, Artificial Sequence
  spacer sequence
tccccagcccaggtaagggc

SEQ ID NO: 529 - DNA, 20 bp, Artificial Sequence
  spacer sequence
ccagcccaggtaagggcagc

SEQ ID NO: 530 - DNA, 20 bp, Artificial Sequence
  spacer sequence
agtccctcaagtccttccag

SEQ ID NO: 531 - DNA, 20 bp, Artificial Sequence
  spacer sequence
agcagcagcagcagcagcag

SEQ ID NO: 532 - DNA, 20 bp, Artificial Sequence
  spacer sequence
tcagccgccgccgcaggcac

SEQ ID NO: 533 - DNA, 20 bp, Artificial Sequence
  spacer sequence
agggtcgccatggcggtctc

SEQ ID NO: 534 - DNA, 20 bp, Artificial Sequence
  spacer sequence
tcagcttttccagggtcgcc

SEQ ID NO: 535 - DNA, 20 bp, Artificial Sequence
  spacer sequence
gccgcagccgcccccgccgc

SEQ ID NO: 536 - DNA, 20 bp, Artificial Sequence
  spacer sequence
gccacagccgggccgggtgg

SEQ ID NO: 537 - DNA, 20 bp, Artificial Sequence
  spacer sequence
tcagccacagccgggccggg

SEQ ID NO: 538 - DNA, 20 bp, Artificial Sequence
  spacer sequence
cggtcggtgcagcggctcct

SEQ ID NO: 539 - DNA, 20 bp, Artificial Sequence
  spacer sequence
ccacaccttcactggtccat

SEQ ID NO: 540 - DNA, 20 bp, Artificial Sequence
  spacer sequence
taaaggaaagtaatggacca

SEQ ID NO: 541 - DNA, 20 bp, Artificial Sequence
  spacer sequence
ctggtccattactttccttt

SEQ ID NO: 542 - DNA, 20 bp, Artificial Sequence
  spacer sequence
atgttcatgagtttggagat

SEQ ID NO: 543 - DNA, 20 bp, Artificial Sequence
  spacer sequence
tgagtttggagataatacag

SEQ ID NO: 544 - DNA, 20 bp, Artificial Sequence
  spacer sequence
atagacacatcggccacacc

SEQ ID NO: 545 - DNA, 20 bp, Artificial Sequence
  spacer sequence
ttattaggcatgttggagac

SEQ ID NO: 546 - DNA, 20 bp, Artificial Sequence
  spacer sequence
caggagaccattgcatcatt

SEQ ID NO: 547 - DNA, 20 bp, Artificial Sequence
  spacer sequence
ggcctggaggctatccagcg

SEQ ID NO: 548 - DNA, 20 bp, Artificial Sequence
  spacer sequence
ggccgagatgtctcgctccg

SEQ ID NO: 549 - DNA, 20 bp, Artificial Sequence
  spacer sequence
aggccagaaagagagagtag

SEQ ID NO: 550 - DNA, 20 bp, Artificial Sequence
  spacer sequence
cgctggatagcctccaggcc

SEQ ID NO: 551 - DNA, 20 bp, Artificial Sequence
  spacer sequence
tgaagctgacagcattcggg

SEQ ID NO: 552 - RNA, 20 nt, Artificial Sequence
  spacer sequence
gaggaggacggccuggccga

SEQ ID NO: 553 - RNA, 20 nt, Artificial Sequence
  spacer sequence
accgcugcgccaaggugcgg

SEQ ID NO: 554 - RNA, 20 nt, Artificial Sequence
  spacer sequence
gccaggccguccuccucgga

SEQ ID NO: 555 - RNA, 20 nt, Artificial Sequence
  spacer sequence
gugcucgggugcuucggcca

SEQ ID NO: 556 - RNA, 20 nt, Artificial Sequence
  spacer sequence
auggccuucuuccuggcuuc

SEQ ID NO: 557 - RNA, 20 nt, Artificial Sequence
  spacer sequence
gcaccaccacguaggugcca

SEQ ID NO: 558 - RNA, 20 nt, Artificial Sequence
  spacer sequence
uccuggcuuccuggugaaga

SEQ ID NO: 559 - RNA, 20 nt, Artificial Sequence
  spacer sequence
uggcuuccuggugaagauga

SEQ ID NO: 560 - RNA, 20 nt, Artificial Sequence
  spacer sequence
ccaggaagccaggaagaagg

SEQ ID NO: 561 - RNA, 20 nt, Artificial Sequence
  spacer sequence
uccuugcauggggccaggau

SEQ ID NO: 562 - RNA, 20 nt, Artificial Sequence
  spacer sequence
ggcggcaaguucugcucagc

SEQ ID NO: 563 - RNA, 20 nt, Artificial Sequence
  spacer sequence
ucuccacgaucgucagcgug

SEQ ID NO: 564 - RNA, 20 nt, Artificial Sequence
  spacer sequence
acgaucgucagcgugagugc

SEQ ID NO: 565 - RNA, 20 nt, Artificial Sequence
  spacer sequence
cucuagcaauggaucguggg

SEQ ID NO: 566 - RNA, 20 nt, Artificial Sequence
  spacer sequence
caaacaaaugugucacaaag

SEQ ID NO: 567 - RNA, 20 nt, Artificial Sequence
  spacer sequence
gauguguauaucacagacaa

SEQ ID NO: 568 - RNA, 20 nt, Artificial Sequence
  spacer sequence
ggaauaaugcuguuguugaa

SEQ ID NO: 569 - RNA, 20 nt, Artificial Sequence
  spacer sequence
aaauccagugacaagucugu

SEQ ID NO: 570 - RNA, 20 nt, Artificial Sequence
  spacer sequence
aggccacagcacuguugcuc

SEQ ID NO: 571 - RNA, 20 nt, Artificial Sequence
  spacer sequence
agaagacaccuucuucccca

SEQ ID NO: 572 - RNA, 20 nt, Artificial Sequence
  spacer sequence
uccccagcccagguaagggc

SEQ ID NO: 573 - RNA, 20 nt, Artificial Sequence
  spacer sequence
ccagcccagguaagggcagc

SEQ ID NO: 574 - RNA, 20 nt, Artificial Sequence
  spacer sequence
agucccucaaguccuuccag

SEQ ID NO: 575 - RNA, 20 nt, Artificial Sequence
  spacer sequence
agcagcagcagcagcagcag

SEQ ID NO: 576 - RNA, 20 nt, Artificial Sequence
  spacer sequence
ucagccgccgccgcaggcac

SEQ ID NO: 577 - RNA, 20 nt, Artificial Sequence
  spacer sequence
agggucgccauggcggucuc

SEQ ID NO: 578 - RNA, 20 nt, Artificial Sequence
  spacer sequence
ucagcuuuuccagggucgcc

SEQ ID NO: 579 - RNA, 20 nt, Artificial Sequence
  spacer sequence
gccgcagccgcccccgccgc

SEQ ID NO: 580 - RNA, 20 nt, Artificial Sequence
  spacer sequence
gccacagccgggccgggugg

SEQ ID NO: 581 - RNA, 20 nt, Artificial Sequence
  spacer sequence
ucagccacagccgggccggg

SEQ ID NO: 582 - RNA, 20 nt, Artificial Sequence
  spacer sequence
cggucggugcagcggcuccu

SEQ ID NO: 583 - RNA, 20 nt, Artificial Sequence
  spacer sequence
ccacaccuucacugguccau

SEQ ID NO: 584 - RNA, 20 nt, Artificial Sequence
  spacer sequence
uaaaggaaaguaauggacca

SEQ ID NO: 585 - RNA, 20 nt, Artificial Sequence
  spacer sequence
cugguccauuacuuuccuuu

SEQ ID NO: 586 - RNA, 20 nt, Artificial Sequence
  spacer sequence
auguucaugaguuuggagau

SEQ ID NO: 587 - RNA, 20 nt, Artificial Sequence
  spacer sequence
ugaguuuggagauaauacag

SEQ ID NO: 588 - RNA, 20 nt, Artificial Sequence
  spacer sequence
auagacacaucggccacacc

SEQ ID NO: 589 - RNA, 20 nt, Artificial Sequence
  spacer sequence
uuauuaggcauguuggagac

SEQ ID NO: 590 - RNA, 20 nt, Artificial Sequence
  spacer sequence
caggagaccauugcaucauu

SEQ ID NO: 591 - RNA, 20 nt, Artificial Sequence
  spacer sequence
ggccuggaggcuauccagcg

SEQ ID NO: 592 - RNA, 20 nt, Artificial Sequence
  spacer sequence
ggccgagaugucucgcuccg

SEQ ID NO: 593 - RNA, 20 nt, Artificial Sequence
  spacer sequence
aggccagaaagagagaguag

SEQ ID NO: 594 - RNA, 20 nt, Artificial Sequence
  spacer sequence
cgcuggauagccuccaggcc

SEQ ID NO: 595 - RNA, 20 nt, Artificial Sequence
  spacer sequence
ugaagcugacagcauucggg

SEQ ID NO: 596 - DNA, 60 bp, Artificial Sequence
  beta-2 microglobulin (B2M) 7.37 oligonucleotide
tgaagctgacagcattcgggccgagatgtctcgctccgtggccttagctgtgctcgcgct

SEQ ID NO: 597 - DNA, 60 bp, Artificial Sequence; identical to SEQ ID NO: 596
  beta-2 microglobulin (B2M) 7.37 oligonucleotide

SEQ ID NO: 598 - DNA, 89 bp, Artificial Sequence
  gNA extension
gggtcggcatggcatctccacctcctcgcggtccgacctgggcatccgaaggaggacgcacgtccactcggatggctaagggagagcca

SEQ ID NO: 599 - DNA, 86 bp, Artificial Sequence
  gNA extension
ggccggcatggtcccagcctcctcgctggcgccggctgggcaacattccgaggggaccgtcccctcggtaatggcgaatgggaccc

SEQ ID NO: 600 - DNA, 69 bp, Artificial Sequence
  gNA extension
gatggccggcatggtcccagcctcctcgctggcgccggctgggcaacaccttcgggtggcgaatgggac

SEQ ID NO: 601 - DNA, 78 bp, Artificial Sequence
  gNA extension
ttttggccggcatggtcccagcctcctcgctggcgccggctgggcaacatgcttcggcatggcgaatgggaccccggg

SEQ ID NO: 602 - DNA, 78 bp, Artificial Sequence
  gNA extension
cattcctcagaaaatgacaaacctgtggggcgtaagtagatcttcggatctatgatcgtgcagacgttaaaatcaggt

SEQ ID NO: 603 - DNA, 64 bp, Artificial Sequence
  gNA extension
cgtggttagggccacgttaaatagttgcttaagccctaagcgttgatcttcggatcaggtgcaa

SEQ ID NO: 604 - DNA, 60 bp, Artificial Sequence
  gNA extension
gggagccccgctgatgaggtcggggagaccgaaagggacttcggtccctacggggctccc

SEQ ID NO: 605 - DNA, 52 bp, Artificial Sequence
  gNA extension
cctgtcaccggatgtgctttccggtctgatgagtccgtgaggacgaaacagg

SEQ ID NO: 606 - DNA, 63 bp, Artificial Sequence
  gNA extension
cgactactgatgagtccgtgaggacgaaacgagtaagctcgtctagtcgcgtgtagcgaagca

SEQ ID NO: 607 - DNA, 49 bp, Artificial Sequence
  gNA extension
cgactactgatgagtccgtgaggacgaaacgagtaagctcgtctagtcg

SEQ ID NO: 608 - DNA, 63 bp, Artificial Sequence
  gNA extension
ccagtactgatgagtccgtgaggacgaaacgagtaagctcgtctactggcgcttttatctcat

SEQ ID NO: 609 - DNA, 77 bp, Artificial Sequence
  gNA extension
acccgcaaggccgacggcatccgccgccgctggtgcaagtccagccgccccttcgggggcgggcgctcatgggtaac

SEQ ID NO: 610 - DNA, 76 bp, Artificial Sequence
  gNA extension
ggcaataaagcggttacaagcccgcaaaaatagcagagtaatgtcgcgatagcgcggcattaatgcagctttattg

SEQ ID NO: 611 - DNA, 36 bp, Artificial Sequence
  gNA extension
ccacccccaccaccacccccacccccaccaccaccc

SEQ ID NO: 612 - RNA, 20 nt, Artificial Sequence
  targeting sequence with ATCN PAM
cuauagcaaacauucuugac

SEQ ID NO: 613 - RNA, 20 nt, Artificial Sequence
  targeting sequence with ATCN PAM
acccccugaaguucccauua

SEQ ID NO: 614 - RNA, 20 nt, Artificial Sequence
  targeting sequence with ATCN PAM
uuuagccaaauucauuucuu

SEQ ID NO: 615 - RNA, 20 nt, Artificial Sequence
  targeting sequence with ATCN PAM
ucuuuuuucuguaacugcuu

SEQ ID NO: 616 - RNA, 20 nt, Artificial Sequence
  targeting sequence with ATCN PAM
ucaugggaggcagagggacc

SEQ ID NO: 617 - RNA, 20 nt, Artificial Sequence
  targeting sequence with ATCN PAM
ccauaaaucuucaugggagg

SEQ ID NO: 618 - RNA, 20 nt, Artificial Sequence
  targeting sequence with ATCN PAM
caucucuuacagaggaaaug

SEQ ID NO: 619 - RNA, 20 nt, Artificial Sequence
  targeting sequence with ATCN PAM
cuuacagaggaaaugaggca

SEQ ID NO: 620 - RNA, 20 nt, Artificial Sequence
  targeting sequence with ATCN PAM
gccuuauauucccugccucc

SEQ ID NO: 621 - RNA, 20 nt, Artificial Sequence
  targeting sequence with ATCN PAM
ugaacaaagaauuggacaaa

SEQ ID NO: 622 - RNA, 20 nt, Artificial Sequence
  targeting sequence with ATCN PAM
aaaccccuuaaugaaucccu

SEQ ID NO: 623 - RNA, 20 nt, Artificial Sequence
  targeting sequence with ATCN PAM
acagcugucccuuuuauuga

SEQ ID NO: 624 - RNA, 20 nt, Artificial Sequence
  targeting sequence with ATCN PAM
aucuacagcugucccuuuua

SEQ ID NO: 625 - RNA, 20 nt, Artificial Sequence
  targeting sequence with ATCN PAM
ugucagcgugaggaugaaag

SEQ ID NO: 626 - RNA, 20 nt, Artificial Sequence
  targeting sequence with ATCN PAM
ucacgcugacacgauggcug

SEQ ID NO: 627 - RNA, 20 nt, Artificial Sequence
  targeting sequence with ATCN PAM
aaucuuguagauugaccacu

SEQ ID NO: 628 - RNA, 20 nt, Artificial Sequence
  targeting sequence with ATCN PAM
ccucuugaagcugaaauuuc

SEQ ID NO: 629 - RNA, 20 nt, Artificial Sequence
  targeting sequence with ATCN PAM
ccugcucacaccaccagccc

SEQ ID NO: 630 - RNA, 20 nt, Artificial Sequence
  targeting sequence with ATCN PAM
ucagagcccaaucagggggu

SEQ ID NO: 631 - RNA, 20 nt, Artificial Sequence
  targeting sequence with ATCN PAM
gggggucaguggagaauggg

SEQ ID NO: 632 - RNA, 20 nt, Artificial Sequence
  targeting sequence with ATCN PAM
cccauucuccacugaccccc

SEQ ID NO: 633 - RNA, 20 nt, Artificial Sequence
  targeting sequence with ATCN PAM
cugagagcacggcugagaau

SEQ ID NO: 634 - RNA, 20 nt, Artificial Sequence
  targeting sequence with ATCN PAM
cuuuccugaggagguguucc

SEQ ID NO: 635 - RNA, 20 nt, Artificial Sequence
  targeting sequence with ATCN PAM
uucccacugcugccaagcca

SEQ ID NO: 636 - RNA, 20 nt, Artificial Sequence
  targeting sequence with ATCN PAM
gaauucucaccugaaguuuu

SEQ ID NO: 637 - RNA, 20 nt, Artificial Sequence
  targeting sequence with ATCN PAM
cuugaaccgggggcggggag

SEQ ID NO: 638 - RNA, 20 nt, Artificial Sequence
  targeting sequence with ATCN PAM
cagcuacucaggaggcugag

SEQ ID NO: 639 - RNA, 20 nt, Artificial Sequence
  targeting sequence with ATCN PAM
auuuaacaaacaacuaaggg

SEQ ID NO: 640 - RNA, 20 nt, Artificial Sequence
  targeting sequence with ATCN PAM
uuaaacaucuauuuaacaaa

SEQ ID NO: 641 - RNA, 20 nt, Artificial Sequence
  targeting sequence with ATCN PAM
ggaagcuucuacagugauug

SEQ ID NO: 642 - RNA, 20 nt, Artificial Sequence
  targeting sequence with ATCN PAM
cuguagaagcuuccagauug

SEQ ID NO: 643 - RNA, 20 nt, Artificial Sequence
  targeting sequence with ATCN PAM
gcauucaggccugucaccau

SEQ ID NO: 644 - RNA, 20 nt, Artificial Sequence
  targeting sequence with ATCN PAM
gacuuuuuacagaucgggaa

SEQ ID NO: 645 - RNA, 20 nt, Artificial Sequence
  targeting sequence with ATCN PAM
guaaaaagucggauguccuu

SEQ ID NO: 646 - RNA, 20 nt, Artificial Sequence
  targeting sequence with ATCN PAM
ggaaacugagacugggaggg

SEQ ID NO: 647 - RNA, 20 nt, Artificial Sequence
  targeting sequence with ATCN PAM
cugaggucacucuuggaguc

SEQ ID NO: 648 - RNA, 20 nt, Artificial Sequence
  targeting sequence with ATCN PAM
acagacccucccagcucuua

SEQ ID NO: 649 - RNA, 20 nt, Artificial Sequence
  targeting sequence with ATCN PAM
auuucuuacccacagacugu

SEQ ID NO: 650 - RNA, 20 nt, Artificial Sequence
  targeting sequence with ATCN PAM
ucuuggcaccaagucugaug

SEQ ID NO: 651 - RNA, 20 nt, Artificial Sequence
  targeting sequence with ATCN PAM
uggcaccaagucugaugcaa

SEQ ID NO: 652 - RNA, 20 nt, Artificial Sequence
  targeting sequence with ATCN PAM
gacuuggugccaagaugauu

SEQ ID NO: 653 - RNA, 20 nt, Artificial Sequence
  targeting sequence with ATCN PAM
cagaacagaguguguuuaaa

SEQ ID NO: 654 - RNA, 20 nt, Artificial Sequence
  targeting sequence with ATCN PAM
ugguuauuugaauuucucug

SEQ ID NO: 655 - RNA, 20 nt, Artificial Sequence
  targeting sequence with ATCN PAM
uuagguggaaauaaaaauuc

SEQ ID NO: 656 - RNA, 20 nt, Artificial Sequence
  targeting sequence with ATCN PAM
acagaauuccucuugccaug

SEQ ID NO: 657 - RNA, 20 nt, Artificial Sequence
  targeting sequence with ATCN PAM
uaauuucaucuacagaauuc

SEQ ID NO: 658 - RNA, 20 nt, Artificial Sequence
  targeting sequence with ATCN PAM
gcagaccuuaagguaggaga

SEQ ID NO: 659 - RNA, 20 nt, Artificial Sequence
  targeting sequence with ATCN PAM
ccuaccuuaaggucugcuga

SEQ ID NO: 660 - RNA, 20 nt, Artificial Sequence
  targeting sequence with ATCN PAM
ugggagcccuuuaaaagcag

SEQ ID NO: 661 - RNA, 20 nt, Artificial Sequence
  targeting sequence with ATCN PAM
uggccaagcaaccauaccuc

SEQ ID NO: 662 - RNA, 20 nt, Artificial Sequence
  targeting sequence with ATCN PAM
uagcacaaaaguaguaugua

SEQ ID NO: 663 - RNA, 20 nt, Artificial Sequence
  targeting sequence with ATCN PAM
gaaguacaacagggaccuag

SEQ ID NO: 664 - RNA, 20 nt, Artificial Sequence
  targeting sequence with ATCN PAM
agucccagaugucaagcacc

SEQ ID NO: 665 - RNA, 20 nt, Artificial Sequence
  targeting sequence with ATCN PAM
caaacagcuucuaguagcaa

SEQ ID NO: 666 - RNA, 20 nt, Artificial Sequence
  targeting sequence with ATCN PAM
gcuucugccucaagcgggua

SEQ ID NO: 667 - RNA, 20 nt, Artificial Sequence
  targeting sequence with ATCN PAM
ccccuaguuuauggggaccu

SEQ ID NO: 668 - RNA, 20 nt, Artificial Sequence
  targeting sequence with ATCN PAM
cugggccaggcuggaagcuc

SEQ ID NO: 669 - RNA, 20 nt, Artificial Sequence
  targeting sequence with ATCN PAM
ggaggcgggcagcaggcgcu

SEQ ID NO: 670 - RNA, 20 nt, Artificial Sequence
  targeting sequence with ATCN PAM
uagcugcuuaggaagcugag

SEQ ID NO: 671 - RNA, 20 nt, Artificial Sequence
  targeting sequence with ATCN PAM
cuugaacucaggaggcagag

SEQ ID NO: 672 - RNA, 20 nt, Artificial Sequence
  targeting sequence with ATCN PAM
cggcucauugcacccucugc

SEQ ID NO: 673 - RNA, 20 nt, Artificial Sequence
  targeting sequence with ATCN PAM
caggacugcccuccagccug

SEQ ID NO: 674 - RNA, 20 nt, Artificial Sequence
  targeting sequence with ATCN PAM
aguggacauugaccuucucc

SEQ ID NO: 675 - RNA, 20 nt, Artificial Sequence
  targeting sequence with ATCN PAM
ugggggacgguuggggugga

SEQ ID NO: 676 - RNA, 20 nt, Artificial Sequence
  targeting sequence with ATCN PAM
cccacagcaggcagggcaca

SEQ ID NO: 677 - RNA, 20 nt, Artificial Sequence
  targeting sequence with ATCN PAM
acauggaaggagcgagaccc

SEQ ID NO: 678 - RNA, 20 nt, Artificial Sequence
  targeting sequence with ATCN PAM
ccaaagucaaagagcuagga

SEQ ID NO: 679 - RNA, 20 nt, Artificial Sequence
  targeting sequence with ATCN PAM
guccagggggcaagugccuc

SEQ ID NO: 680 - RNA, 20 nt, Artificial Sequence
  targeting sequence with ATCN PAM
aaaguuucaccuacugcauc

SEQ ID NO: 681 - RNA, 20 nt, Artificial Sequence
  targeting sequence with ATCN PAM
ugaacauuugccaugcccuu

SEQ ID NO: 682 - RNA, 20 nt, Artificial Sequence
  targeting sequence with ATCN PAM
aaaugacauacugcugugcg

SEQ ID NO: 683 - RNA, 20 nt, Artificial Sequence
  targeting sequence with ATCN PAM
cuuccaaguggggcuugccc

SEQ ID NO: 684 - RNA, 20 nt, Artificial Sequence
  targeting sequence with ATCN PAM
caaaucccuuccaagugggg

SEQ ID NO: 685 - RNA, 20 nt, Artificial Sequence
  targeting sequence with ATCN PAM
cugaagccucucuuuaaggu

SEQ ID NO: 686 - RNA, 20 nt, Artificial Sequence
  targeting sequence with ATCN PAM
gugugauccggggccaggac

SEQ ID NO: 687 - RNA, 20 nt, Artificial Sequence
  targeting sequence with ATCN PAM
ggacacagagaaggagggag

SEQ ID NO: 688 - RNA, 20 nt, Artificial Sequence
  targeting sequence with ATCN PAM
ccuucgcuccaccaagcgaa

SEQ ID NO: 689 - RNA, 20 nt, Artificial Sequence
  targeting sequence with ATCN PAM
ggugccugagggccccagcc

SEQ ID NO: 690 - RNA, 20 nt, Artificial Sequence
  targeting sequence with ATCN PAM
cagggccaccucgaugggac

SEQ ID NO: 691 - RNA, 20 nt, Artificial Sequence
  targeting sequence with ATCN PAM
agguggcccugggaugcugg

SEQ ID NO: 692 - RNA, 20 nt, Artificial Sequence
  targeting sequence with ATCN PAM
ccucuccagagaccuguacu

SEQ ID NO: 693 - RNA, 20 nt, Artificial Sequence
  targeting sequence with ATCN PAM
cccuaagcuuuaacuuccuc

SEQ ID NO: 694 - RNA, 20 nt, Artificial Sequence
  targeting sequence with ATCN PAM
cugcccucaggaagcuccua

SEQ ID NO: 695 - RNA, 20 nt, Artificial Sequence
  targeting sequence with ATCN PAM
ugaguguaaguccccuuagu

SEQ ID NO: 696 - RNA, 20 nt, Artificial Sequence
  targeting sequence with ATCN PAM
gcccucuaagcaaacuuccu

SEQ ID NO: 697 - RNA, 20 nt, Artificial Sequence
  targeting sequence with ATCN PAM
cagcaggugacagcuggcag

SEQ ID NO: 698 - RNA, 20 nt, Artificial Sequence
  targeting sequence with ATCN PAM
ucauuuuacggaugaggaga

SEQ ID NO: 699 - RNA, 20 nt, Artificial Sequence
  targeting sequence with ATCN PAM
guaaaaugaggauaauauuu

SEQ ID NO: 700 - RNA, 20 nt, Artificial Sequence
  targeting sequence with ATCN PAM
gcaaggaugcugggagcuca

SEQ ID NO: 701 - RNA, 20 nt, Artificial Sequence
  targeting sequence with ATCN PAM
uugcagaugagggcaggaca

SEQ ID NO: 702 - RNA, 20 nt, Artificial Sequence
  targeting sequence with ATCN PAM
cagcuuccucggcugucuuc

SEQ ID NO: 703 - RNA, 20 nt, Artificial Sequence
  targeting sequence with ATCN PAM
aggaucccaucaaucugcuc

SEQ ID NO: 704 - RNA, 20 nt, Artificial Sequence
  targeting sequence with ATCN PAM
uggauuugaaccccagccug

SEQ ID NO: 705 - RNA, 20 nt, Artificial Sequence
  targeting sequence with ATCN PAM
caucaaucugcuccgucacc

SEQ ID NO: 706 - RNA, 20 nt, Artificial Sequence
  targeting sequence with ATCN PAM
aucugcuccgucacccuggu

SEQ ID NO: 707 - RNA, 20 nt, Artificial Sequence
  targeting sequence with ATCN PAM
gcuccgucacccuggucugu

SEQ ID NO: 708 - RNA, 20 nt, Artificial Sequence
  targeting sequence with ATCN PAM
cagaccagggugacggagca

SEQ ID NO: 709 - RNA, 20 nt, Artificial Sequence
  targeting sequence with ATCN PAM
accacuucuaucucuggaca

SEQ ID NO: 710 - RNA, 20 nt, Artificial Sequence
  targeting sequence with ATCN PAM
gguaaguuguaagcucucca

SEQ ID NO: 711 - RNA, 20 nt, Artificial Sequence
  targeting sequence with ATCN PAM
cuggagguaugcaaguagag

SEQ ID NO: 712 - RNA, 20 nt, Artificial Sequence
  targeting sequence with ATCN PAM
cuacuugcauaccuccaggg

SEQ ID NO: 713 - RNA, 20 nt, Artificial Sequence
  targeting sequence with ATCN PAM
cuuggcagacaucauaucaa

SEQ ID NO: 714 - RNA, 20 nt, Artificial Sequence
  targeting sequence with ATCN PAM
uaucaaaaucuaaagcaucc

SEQ ID NO: 715 - RNA, 20 nt, Artificial Sequence
  targeting sequence with ATCN PAM
ccacuuacgaggaagccgug

SEQ ID NO: 716 - RNA, 20 nt, Artificial Sequence
  targeting sequence with ATCN PAM
acuuggcuccagggcuuccu

SEQ ID NO: 717 - RNA, 20 nt, Artificial Sequence
  targeting sequence with ATCN PAM
agggaugcccugcucagcac

SEQ ID NO: 718 - RNA, 20 nt, Artificial Sequence
  targeting sequence with ATCN PAM
cucgauccacuuggcuccag

SEQ ID NO: 719 - RNA, 20 nt, Artificial Sequence
  targeting sequence with ATCN PAM
gccuugcucuugaugccguu

SEQ ID NO: 720 - RNA, 20 nt, Artificial Sequence
  targeting sequence with ATCN PAM
agagcaaggcugaugcucuc

SEQ ID NO: 721 - RNA, 20 nt, Artificial Sequence
  targeting sequence with ATCN PAM
uaucuaaaaaaaaaaaaaag

SEQ ID NO: 722 - RNA, 20 nt, Artificial Sequence
  targeting sequence with ATCN PAM
cacugugucacccaggcugg

SEQ ID NO: 723 - RNA, 20 nt, Artificial Sequence
  targeting sequence with ATCN PAM
ugacucgcugcagccucuuc

SEQ ID NO: 724 - RNA, 20 nt, Artificial Sequence
  targeting sequence with ATCN PAM
cuugagccugggaggaagag

SEQ ID NO: 725 - RNA, 20 nt, Artificial Sequence
  targeting sequence with ATCN PAM
ucccaccucagccucccaag

SEQ ID NO: 726 - RNA, 20 nt, Artificial Sequence
  targeting sequence with ATCN PAM
uagugacuuggacaagugau

SEQ ID NO: 727 - RNA, 20 nt, Artificial Sequence
  targeting sequence with ATCN PAM
cuuguccaagucacuaagau

SEQ ID NO: 728 - RNA, 20 nt, Artificial Sequence
  targeting sequence with ATCN PAM
guaaaaugggaauugaggau

SEQ ID NO: 729 - RNA, 20 nt, Artificial Sequence
  targeting sequence with ATCN PAM
ucaauucccauuuuacagau

SEQ ID NO: 730 - RNA, 20 nt, Artificial Sequence
  targeting sequence with ATCN PAM
gcucuuugagggaauccuca

SEQ ID NO: 731 - RNA, 20 nt, Artificial Sequence
  targeting sequence with ATCN PAM
ucacaaaucagcucuuugag

SEQ ID NO: 732 - RNA, 20 nt, Artificial Sequence
  targeting sequence with ATCN PAM
caccuggccugggcuuucau

SEQ ID NO: 733 - RNA, 20 nt, Artificial Sequence
  targeting sequence with ATCN PAM
ugaaagaggcugagucaggg

SEQ ID NO: 734 - RNA, 20 nt, Artificial Sequence
  targeting sequence with ATCN PAM
cagggccuccgcaccugcug

SEQ ID NO: 735 - RNA, 20 nt, Artificial Sequence
  targeting sequence with ATCN PAM
uuccgguuagcaagccccgu

SEQ ID NO: 736 - RNA, 20 nt, Artificial Sequence
  targeting sequence with ATCN PAM
uccuccccaggccugccccu

SEQ ID NO: 737 - RNA, 20 nt, Artificial Sequence
  targeting sequence with ATCN PAM
agguccacgcaggcaaggcg

SEQ ID NO: 738 - RNA, 20 nt, Artificial Sequence
  targeting sequence with ATCN PAM
uugcgagcgggcucccauga

SEQ ID NO: 739 - RNA, 20 nt, Artificial Sequence
  targeting sequence with ATCN PAM
cgaaagcugggguuagcgcg

SEQ ID NO: 740 - RNA, 20 nt, Artificial Sequence
  targeting sequence with ATCN PAM
uccagcagagggcgcgcuaa

SEQ ID NO: 741 - RNA, 20 nt, Artificial Sequence
  targeting sequence with ATCN PAM
cccgcauuucacaggcgagg

SEQ ID NO: 742 - RNA, 20 nt, Artificial Sequence
  targeting sequence with ATCN PAM
ccuucacauucacacgcuau

SEQ ID NO: 743 - RNA, 20 nt, Artificial Sequence
  targeting sequence with ATCN PAM
gggagguacauuauuauucc

SEQ ID NO: 744 - RNA, 20 nt, Artificial Sequence
  targeting sequence with ATCN PAM
gguuaccucaguuuccuccu

SEQ ID NO: 745 - RNA, 20 nt, Artificial Sequence
  targeting sequence with ATCN PAM
ugaccacacugccccacagu

SEQ ID NO: 746 - RNA, 20 nt, Artificial Sequence
  targeting sequence with ATCN PAM
ccucauuugccuacuguggg

SEQ ID NO: 747 - RNA, 20 nt, Artificial Sequence
  targeting sequence with ATCN PAM
gagcgagggagcacacaggg

SEQ ID NO: 748 - RNA, 20 nt, Artificial Sequence
  targeting sequence with ATCN PAM
ggaaggucuucucgucagcc

SEQ ID NO: 749 - RNA, 20 nt, Artificial Sequence
  targeting sequence with ATCN PAM
gcuucauugugcuggggcuu

SEQ ID NO: 750 - RNA, 20 nt, Artificial Sequence
  targeting sequence with ATCN PAM
uggcucaugaggaacguacc

SEQ ID NO: 751 - RNA, 20 nt, Artificial Sequence
  targeting sequence with ATCN PAM
gccccaggucuacggcaccu

SEQ ID NO: 752 - RNA, 20 nt, Artificial Sequence
  targeting sequence with ATCN PAM
ccaugacgcugcccauggca

SEQ ID NO: 753 - RNA, 20 nt, Artificial Sequence
  targeting sequence with ATCN PAM
ggggcaucaucuggagcaug

SEQ ID NO: 754 - RNA, 20 nt, Artificial Sequence
  targeting sequence with ATCN PAM
ucuggagcaugugccagugc

SEQ ID NO: 755 - RNA, 20 nt, Artificial Sequence
  targeting sequence with ATCN PAM
ggagcaugugccagugcuac

SEQ ID NO: 756 - RNA, 20 nt, Artificial Sequence
  targeting sequence with ATCN PAM
cuaaauuacacauaaggcug

SEQ ID NO: 757 - RNA, 20 nt, Artificial Sequence
  targeting sequence with ATCN PAM
ucaaugccuagagaggcugg

SEQ ID NO: 758 - RNA, 20 nt, Artificial Sequence
  targeting sequence with ATCN PAM
acaguuacucauuaauaccc

SEQ ID NO: 759 - RNA, 20 nt, Artificial Sequence
  targeting sequence with ATCN PAM
aucaacaguuacucauuaau

SEQ ID NO: 760 - RNA, 20 nt, Artificial Sequence
  targeting sequence with ATCN PAM
gggccuggagguugccacaa

SEQ ID NO: 761 - RNA, 20 nt, Artificial Sequence
  targeting sequence with ATCN PAM
cugcuccuucaugucccacu

SEQ ID NO: 762 - RNA, 20 nt, Artificial Sequence
  targeting sequence with ATCN PAM
caccuacaaagcccagcuca

SEQ ID NO: 763 - RNA, 20 nt, Artificial Sequence
  targeting sequence with ATCN PAM
ucucugcuuggugaacucuu

SEQ ID NO: 764 - RNA, 20 nt, Artificial Sequence
  targeting sequence with ATCN PAM
ggaauaaugcagaauucaaa

SEQ ID NO: 765 - RNA, 20 nt, Artificial Sequence
  targeting sequence with ATCN PAM
cugaaccucgaggacauuau

SEQ ID NO: 766 - RNA, 20 nt, Artificial Sequence
  targeting sequence with ATCN PAM
uuaaggcugaauaguauuuc

SEQ ID NO: 767 - RNA, 20 nt, Artificial Sequence
  targeting sequence with ATCN PAM
uauggauagacuauauuuug

SEQ ID NO: 768 - RNA, 20 nt, Artificial Sequence
  targeting sequence with ATCN PAM
auaugaugaaauacuauuca

SEQ ID NO: 769 - RNA, 20 nt, Artificial Sequence
  targeting sequence with ATCN PAM
gcaagcaaaggagagacagc

SEQ ID NO: 770 - RNA, 20 nt, Artificial Sequence
  targeting sequence with ATCN PAM
ccuucgucccugcugacucu

SEQ ID NO: 771 - RNA, 20 nt, Artificial Sequence
  targeting sequence with ATCN PAM
ucuccccaaaggccaugggc

SEQ ID NO: 772 - RNA, 20 nt, Artificial Sequence
  targeting sequence with ATCN PAM
cggcagcaagcccauucucc

SEQ ID NO: 773 - RNA, 20 nt, Artificial Sequence
  targeting sequence with ATCN PAM
guacaaugggaauaauaaug

SEQ ID NO: 774 - RNA, 20 nt, Artificial Sequence
  targeting sequence with ATCN PAM
uguauucaccgaaacacugu

SEQ ID NO: 775 - RNA, 20 nt, Artificial Sequence
  targeting sequence with ATCN PAM
ccaugaaacaaaucauacaa

SEQ ID NO: 776 - RNA, 20 nt, Artificial Sequence
  targeting sequence with ATCN PAM
uacaaugaaauaaauguacu

SEQ ID NO: 777 - RNA, 20 nt, Artificial Sequence
  targeting sequence with ATCN PAM
uccuagcuguauaaagagcc

SEQ ID NO: 778 - RNA, 20 nt, Artificial Sequence
  targeting sequence with ATCN PAM
agaugaaagucaugagcuac

SEQ ID NO: 779 - RNA, 20 nt, Artificial Sequence
  targeting sequence with ATCN PAM
ggauguggcugaagucaggc

SEQ ID NO: 780 - RNA, 20 nt, Artificial Sequence
  targeting sequence with ATCN PAM
caggggccagcaaggagcgg

SEQ ID NO: 781 - RNA, 20 nt, Artificial Sequence
  targeting sequence with ATCN PAM
cugguucccagcuucggcug

SEQ ID NO: 782 - RNA, 20 nt, Artificial Sequence
  targeting sequence with ATCN PAM
aggccugaacgucgccaggg

SEQ ID NO: 783 - RNA, 20 nt, Artificial Sequence
  targeting sequence with ATCN PAM
acaagggcucagacgagagu

SEQ ID NO: 784 - RNA, 20 nt, Artificial Sequence
  targeting sequence with ATCN PAM
cagggugucccacacccucc

SEQ ID NO: 785 - RNA, 20 nt, Artificial Sequence
  targeting sequence with ATCN PAM
gccacaucucaggguguccc

SEQ ID NO: 786 - RNA, 20 nt, Artificial Sequence
  targeting sequence with ATCN PAM
cuguguggggaaacugaggc

SEQ ID NO: 787 - RNA, 20 nt, Artificial Sequence
  targeting sequence with ATCN PAM
ucccuguguggggaaacuga

SEQ ID NO: 788 - RNA, 20 nt, Artificial Sequence
  targeting sequence with ATCN PAM
uuccuacuacccaggaaugu

SEQ ID NO: 789 - RNA, 20 nt, Artificial Sequence
  targeting sequence with ATCN PAM
agggccuacuguaugccagg

SEQ ID NO: 790 - RNA, 20 nt, Artificial Sequence
  targeting sequence with ATCN PAM
cugucuguuugugaacugag

SEQ ID NO: 791 - RNA, 20 nt, Artificial Sequence
  targeting sequence with ATCN PAM
auguacuuauucauuccauc

SEQ ID NO: 792 - RNA, 20 nt, Artificial Sequence
  targeting sequence with ATCN PAM
acauuacugagcaccaacuu

SEQ ID NO: 793 - RNA, 20 nt, Artificial Sequence
  targeting sequence with ATCN PAM
accccugaggagcucugagu

SEQ ID NO: 794 - RNA, 20 nt, Artificial Sequence
  targeting sequence with ATCN PAM
acuucuccaauuauucaggg

SEQ ID NO: 795 - RNA, 20 nt, Artificial Sequence
  targeting sequence with ATCN PAM
gaaccaggucacucaucuac

SEQ ID NO: 796 - RNA, 20 nt, Artificial Sequence
  targeting sequence with ATCN PAM
gcuguaaaccuaagaaagaa

SEQ ID NO: 797 - RNA, 20 nt, Artificial Sequence
  targeting sequence with ATCN PAM
accuucccgggccucaguuu

SEQ ID NO: 798 - RNA, 20 nt, Artificial Sequence
  targeting sequence with ATCN PAM
uacccuaggucuugcagcua

SEQ ID NO: 799 - RNA, 20 nt, Artificial Sequence
  targeting sequence with ATCN PAM
cugagucagaaugccugggu

SEQ ID NO: 800 - RNA, 20 nt, Artificial Sequence
  targeting sequence with ATCN PAM
uggaaggaagccaagggggc

SEQ ID NO: 801 - RNA, 20 nt, Artificial Sequence
  targeting sequence with ATCN PAM
ccacaugacagggaggaagc

SEQ ID NO: 802 - RNA, 20 nt, Artificial Sequence
  targeting sequence with ATCN PAM
gggcaaagucuuggaagcgg

SEQ ID NO: 803 - RNA, 20 nt, Artificial Sequence
  targeting sequence with ATCN PAM
aucagggcaaagucuuggaa

SEQ ID NO: 804 - RNA, 20 nt, Artificial Sequence
  targeting sequence with ATCN PAM
uccaacguuggggcaucaau

SEQ ID NO: 805 - RNA, 20 nt, Artificial Sequence
  targeting sequence with ATCN PAM
ggcagcccauaguacagguc

SEQ ID NO: 806 - RNA, 20 nt, Artificial Sequence
  targeting sequence with ATCN PAM
cagccuugggugucaggcuc

SEQ ID NO: 807 - RNA, 20 nt, Artificial Sequence
  targeting sequence with ATCN PAM
uauuuugccuucaaagguug

SEQ ID NO: 808 - RNA, 20 nt, Artificial Sequence
  targeting sequence with ATCN PAM
ggggcccagagggagcacca

SEQ ID NO: 809 - RNA, 20 nt, Artificial Sequence
  targeting sequence with ATCN PAM
uuugugaaggccagucaggu

SEQ ID NO: 810 - RNA, 20 nt, Artificial Sequence
  targeting sequence with ATCN PAM
gcguaacaauagcaucaccc

SEQ ID NO: 811 - RNA, 20 nt, Artificial Sequence
  targeting sequence with ATCN PAM
cugcaacgcuugccugugcc

SEQ ID NO: 812 - RNA, 20 nt, Artificial Sequence
  targeting sequence with ATCN PAM
ugggcuggggcacaggcaag

SEQ ID NO: 813 - RNA, 20 nt, Artificial Sequence
  targeting sequence with ATCN PAM
uggcagcugcagagaaaaug

SEQ ID NO: 814 - RNA, 20 nt, Artificial Sequence
  targeting sequence with ATCN PAM
ccuucccuaggccaggaccc

SEQ ID NO: 815 - RNA, 20 nt, Artificial Sequence
  targeting sequence with ATCN PAM
uucacugcagaggcagaaau

SEQ ID NO: 816 - RNA, 20 nt, Artificial Sequence
  targeting sequence with ATCN PAM
gaagacucagcugugaccag

SEQ ID NO: 817 - RNA, 20 nt, Artificial Sequence
  targeting sequence with ATCN PAM
ucauucaccugcaaauucuu

SEQ ID NO: 818 - RNA, 20 nt, Artificial Sequence
  targeting sequence with ATCN PAM
ugccccgagggaaggggugg

SEQ ID NO: 819 - RNA, 20 nt, Artificial Sequence
  targeting sequence with ATCN PAM
caggagugauuccccacacc

SEQ ID NO: 820 - RNA, 20 nt, Artificial Sequence
  targeting sequence with ATCN PAM
cuccugagauucagcaccac

SEQ ID NO: 821 - RNA, 20 nt, Artificial Sequence
  targeting sequence with ATCN PAM
uccugcuggcaggcccagca

SEQ ID NO: 822 - RNA, 20 nt, Artificial Sequence
  targeting sequence with ATCN PAM
gcagggggcuugggguagug

SEQ ID NO: 823 - RNA, 20 nt, Artificial Sequence
  targeting sequence with ATCN PAM
cacuccacuaccccaagccc

SEQ ID NO: 824 - RNA, 20 nt, Artificial Sequence
  targeting sequence with ATCN PAM
ugcagcaagagccagggaga

SEQ ID NO: 825 - RNA, 20 nt, Artificial Sequence
  targeting sequence with ATCN PAM
gguguguggucuccccauca

SEQ ID NO: 826 - RNA, 20 nt, Artificial Sequence
  targeting sequence with ATCN PAM
gcccaggaaggucccgguug

SEQ ID NO: 827 - RNA, 20 nt, Artificial Sequence
  targeting sequence with ATCN PAM
ucgagcgugaaaggggccuc

SEQ ID NO: 828 - RNA, 20 nt, Artificial Sequence
  targeting sequence with ATCN PAM
aaaugagguaucuucgagcg

SEQ ID NO: 829 - RNA, 20 nt, Artificial Sequence
  targeting sequence with ATCN PAM
uccaaaugagguaucuucga

SEQ ID NO: 830 - RNA, 20 nt, Artificial Sequence
  targeting sequence with ATCN PAM
gucauuugcacaugagaaag

SEQ ID NO: 831 - RNA, 20 nt, Artificial Sequence
  targeting sequence with ATCN PAM
uggaaucuuggaagugaugg

SEQ ID NO: 832 - RNA, 20 nt, Artificial Sequence
  targeting sequence with ATCN PAM
uggaagugauggggguguuu

SEQ ID NO: 833 - RNA, 20 nt, Artificial Sequence
  targeting sequence with ATCN PAM
cuuccaagauuccaagauau

SEQ ID NO: 834 - RNA, 20 nt, Artificial Sequence
  targeting sequence with ATCN PAM
aacacccccaucacuuccaa

SEQ ID NO: 835 - RNA, 20 nt, Artificial Sequence
  targeting sequence with ATCN PAM
ugucaaugcccugcagccaa

SEQ ID NO: 836 - RNA, 20 nt, Artificial Sequence
  targeting sequence with ATCN PAM
cuccagggccuuucccucuc

SEQ ID NO: 837 - RNA, 20 nt, Artificial Sequence
  targeting sequence with ATCN PAM
cagcccucccugggcuccuc

SEQ ID NO: 838 - RNA, 20 nt, Artificial Sequence
  targeting sequence with ATCN PAM
caggcuccagaaucagaaag

SEQ ID NO: 839 - RNA, 20 nt, Artificial Sequence
  targeting sequence with ATCN PAM
gaaagaccugguuuuaccuu

SEQ ID NO: 840 - RNA, 20 nt, Artificial Sequence
  targeting sequence with ATCN PAM
uccccacugcauaaaugugg

SEQ ID NO: 841 - RNA, 20 nt, Artificial Sequence
  targeting sequence with ATCN PAM
cccugugcuaguguggaggg

SEQ ID NO: 842 - RNA, 20 nt, Artificial Sequence
  targeting sequence with ATCN PAM
uccaugacugccuauugccc

SEQ ID NO: 843 - RNA, 20 nt, Artificial Sequence
  targeting sequence with ATCN PAM
gacccaugcuugucuugggg

SEQ ID NO: 844 - RNA, 20 nt, Artificial Sequence
  targeting sequence with ATCN PAM
uuacaaaaugaugccagugu

SEQ ID NO: 845 - RNA, 20 nt, Artificial Sequence
  targeting sequence with ATCN PAM
ucuuuacaaaaugaugccag

SEQ ID NO: 846 - RNA, 20 nt, Artificial Sequence
  targeting sequence with ATCN PAM
uuauuacaucaucuuuacaa

SEQ ID NO: 847 - RNA, 20 nt, Artificial Sequence
  targeting sequence with ATCN PAM
aaauauauagacucacucac

SEQ ID NO: 848 - RNA, 20 nt, Artificial Sequence
  targeting sequence with ATCN PAM
guccacaucaaaauauauag

SEQ ID NO: 849 - RNA, 20 nt, Artificial Sequence
  targeting sequence with ATCN PAM
gcucucuuucucuuaauuau

SEQ ID NO: 850 - RNA, 20 nt, Artificial Sequence
  targeting sequence with ATCN PAM
aggaaggagggaauuaacaa

SEQ ID NO: 851 - RNA, 20 nt, Artificial Sequence
  targeting sequence with ATCN PAM
ccacuuucagucaaugaauu

SEQ ID NO: 852 - RNA, 20 nt, Artificial Sequence
  targeting sequence with ATCN PAM
caauucauugacugaaagug

SEQ ID NO: 853 - RNA, 20 nt, Artificial Sequence
  targeting sequence with ATCN PAM
ugacaauccuuuucucugcu

SEQ ID NO: 854 - RNA, 20 nt, Artificial Sequence
  targeting sequence with ATCN PAM
uuuucucugcugcuggaggu

SEQ ID NO: 855 - RNA, 20 nt, Artificial Sequence
  targeting sequence with ATCN PAM
caggaccaccuccagcagca

SEQ ID NO: 856 - RNA, 20 nt, Artificial Sequence
  targeting sequence with ATCN PAM
aguucuggccaguaagaccu

SEQ ID NO: 857 - RNA, 20 nt, Artificial Sequence
  targeting sequence with ATCN PAM
guugggggucacuuucugaa

SEQ ID NO: 858 - RNA, 20 nt, Artificial Sequence
  targeting sequence with ATCN PAM
guuuucaaugccugcaaagg

SEQ ID NO: 859 - RNA, 20 nt, Artificial Sequence
  targeting sequence with ATCN PAM
cuuggaauuucccucaugac

SEQ ID NO: 860 - RNA, 20 nt, Artificial Sequence
  targeting sequence with ATCN PAM
cugugaaucucuuggaauuu

SEQ ID NO: 861 - RNA, 20 nt, Artificial Sequence
  targeting sequence with ATCN PAM
cccagcugccccggcuuccc

SEQ ID NO: 862 - RNA, 20 nt, Artificial Sequence
  targeting sequence with ATCN PAM
gcagguggugcugauguccc

SEQ ID NO: 863 - RNA, 20 nt, Artificial Sequence
  targeting sequence with ATCN PAM
gcaccaccugcagauccccc

SEQ ID NO: 864 - RNA, 20 nt, Artificial Sequence
  targeting sequence with ATCN PAM
aggucaucugcaugaaaaug

SEQ ID NO: 865 - RNA, 20 nt, Artificial Sequence
  targeting sequence with ATCN PAM
gcaugaaaaugaccuugagg

SEQ ID NO: 866 - RNA, 20 nt, Artificial Sequence
  targeting sequence with ATCN PAM
ccaaaacccagcccagcaac

SEQ ID NO: 867 - RNA, 20 nt, Artificial Sequence
  targeting sequence with ATCN PAM
gaccuuccucccuggcugag

SEQ ID NO: 868 - RNA, 20 nt, Artificial Sequence
  targeting sequence with ATCN PAM
cagccagggaggaaggucag

SEQ ID NO: 869 - RNA, 20 nt, Artificial Sequence
  targeting sequence with ATCN PAM
ccuccucgucaggguguuaa

SEQ ID NO: 870 - RNA, 20 nt, Artificial Sequence
  targeting sequence with ATCN PAM
ccagcagcccgggccccagg

SEQ ID NO: 871 - RNA, 20 nt, Artificial Sequence
  targeting sequence with ATCN PAM
gugcucugagguccagggug

SEQ ID NO: 872 - RNA, 20 nt, Artificial Sequence
  targeting sequence with ATCN PAM
ggugcaugcccuuggggucc

SEQ ID NO: 873 - RNA, 20 nt, Artificial Sequence
  targeting sequence with ATCN PAM
aaaggaccccaagggcaugc

SEQ ID NO: 874 - RNA, 20 nt, Artificial Sequence
  targeting sequence with ATCN PAM
aaauggccagucggggugac

SEQ ID NO: 875 - RNA, 20 nt, Artificial Sequence
  targeting sequence with ATCN PAM
gaccacucagaucccguccu

SEQ ID NO: 876 - RNA, 20 nt, Artificial Sequence
  targeting sequence with ATCN PAM
gaguggucagauggcagccc

SEQ ID NO: 877 - RNA, 20 nt, Artificial Sequence
  targeting sequence with ATCN PAM
cguccuuccucccccuccau

SEQ ID NO: 878 - RNA, 20 nt, Artificial Sequence
  targeting sequence with ATCN PAM
aaaacugcuuuagaaagucc

SEQ ID NO: 879 - RNA, 20 nt, Artificial Sequence
  targeting sequence with ATCN PAM
uguuggacuuugcaucuccu

SEQ ID NO: 880 - RNA, 20 nt, Artificial Sequence
  targeting sequence with ATCN PAM
ccucagugaggggagaguga

SEQ ID NO: 881 - RNA, 20 nt, Artificial Sequence
  targeting sequence with ATCN PAM
cucuccccucacugaggaga

SEQ ID NO: 882 - RNA, 20 nt, Artificial Sequence
  targeting sequence with ATCN PAM
gcagaacaguggcaaucacu

SEQ ID NO: 883 - RNA, 20 nt, Artificial Sequence
  targeting sequence with ATCN PAM
cagcucugcuacaaauucac

SEQ ID NO: 884 - RNA, 20 nt, Artificial Sequence
  targeting sequence with ATCN PAM
agaacaugaguucuaauccc

SEQ ID NO: 885 - RNA, 20 nt, Artificial Sequence
  targeting sequence with ATCN PAM
ccgccugggucgugucccau

SEQ ID NO: 886 - RNA, 20 nt, Artificial Sequence
  targeting sequence with ATCN PAM
gcugccaaggccuagcuuuc

SEQ ID NO: 887 - RNA, 20 nt, Artificial Sequence
  targeting sequence with ATCN PAM
ccuucccccuuucuucccuc

SEQ ID NO: 888 - RNA, 20 nt, Artificial Sequence
  targeting sequence with ATCN PAM
ugaggagggaagaaaggggg

SEQ ID NO: 889 - RNA, 20 nt, Artificial Sequence
  targeting sequence with ATCN PAM
cauggccccucacaggguac

SEQ ID NO: 890 - RNA, 20 nt, Artificial Sequence
  targeting sequence with ATCN PAM
cucugguggguguggugggg

SEQ ID NO: 891 - RNA, 20 nt, Artificial Sequence
  targeting sequence with ATCN PAM
cuucugcuggaccaggagcu

SEQ ID NO: 892 - RNA, 20 nt, Artificial Sequence
  targeting sequence with ATCN PAM
ggcaaagaaugcugggaagg

SEQ ID NO: 893 - RNA, 20 nt, Artificial Sequence
  targeting sequence with ATCN PAM
gugguucccacacuuagggc

SEQ ID NO: 894 - RNA, 20 nt, Artificial Sequence
  targeting sequence with ATCN PAM
ccugaggaguuuaugaaaug

SEQ ID NO: 895 - RNA, 20 nt, Artificial Sequence
  targeting sequence with ATCN PAM
gcauuucauaaacuccucag

SEQ ID NO: 896 - RNA, 20 nt, Artificial Sequence
  targeting sequence with ATCN PAM
ccaggaacugggcccaggaa

SEQ ID NO: 897 - RNA, 20 nt, Artificial Sequence
  targeting sequence with ATCN PAM
gcaauucucaaagcgggagg

SEQ ID NO: 898 - RNA, 20 nt, Artificial Sequence
  targeting sequence with ATCN PAM
gagugguggaaugaggcugc

SEQ ID NO: 899 - RNA, 20 nt, Artificial Sequence
  targeting sequence with ATCN PAM
ccuguccccacugacacauu

SEQ ID NO: 900 - RNA, 20 nt, Artificial Sequence
  targeting sequence with ATCN PAM
uucucuuuucaucauucucu

SEQ ID NO: 901 - RNA, 20 nt, Artificial Sequence
  targeting sequence with ATCN PAM
uucucuagugcucuuaucac

SEQ ID NO: 902 - RNA, 20 nt, Artificial Sequence
  targeting sequence with ATCN PAM
ccaacuuauaggcugaacau

SEQ ID NO: 903 - RNA, 20 nt, Artificial Sequence
  targeting sequence with ATCN PAM
cuuuucucaugcagcccuca

SEQ ID NO: 904 - RNA, 20 nt, Artificial Sequence
  targeting sequence with ATCN PAM
uguucacugcuguaccccaa

SEQ ID NO: 905 - RNA, 20 nt, Artificial Sequence
  targeting sequence with ATCN PAM
ccuuccauguuacagacauu

SEQ ID NO: 906 - RNA, 20 nt, Artificial Sequence
  targeting sequence with ATCN PAM
agggagguuuuguucuguuu

SEQ ID NO: 907 - RNA, 20 nt, Artificial Sequence
  targeting sequence with ATCN PAM
caaaaagaaaaaaaaugcaa

SEQ ID NO: 908 - RNA, 20 nt, Artificial Sequence
  targeting sequence with ATCN PAM
ugggugacaagagggagacu

SEQ ID NO: 909 - RNA, 20 nt, Artificial Sequence
  targeting sequence with ATCN PAM
cgccauugcacuucauccug

SEQ ID NO: 910 - RNA, 20 nt, Artificial Sequence
  targeting sequence with ATCN PAM
cagcucaccacaaccuccgc

SEQ ID NO: 911 - RNA, 20 nt, Artificial Sequence
  targeting sequence with ATCN PAM
cuugaaccugggaggcggag

SEQ ID NO: 912 - RNA, 20 nt, Artificial Sequence
  targeting sequence with ATCN PAM
cagcuacucgguaggcugag

SEQ ID NO: 913 - RNA, 20 nt, Artificial Sequence
  targeting sequence with ATCN PAM
ccugaagucaggaguucaag

SEQ ID NO: 914 - RNA, 20 nt, Artificial Sequence
  targeting sequence with ATCN PAM
acccgccucagccucccaac

SEQ ID NO: 915 - RNA, 20 nt, Artificial Sequence
  targeting sequence with ATCN PAM
uaacacguugggaggcugag

SEQ ID NO: 916 - RNA, 20 nt, Artificial Sequence
  targeting sequence with ATCN PAM
cuuccacccuaaaaaaacaa

SEQ ID NO: 917 - RNA, 20 nt, Artificial Sequence
  targeting sequence with ATCN PAM
gagcgugcugagaggcuggc

SEQ ID NO: 918 - RNA, 20 nt, Artificial Sequence
  targeting sequence with ATCN PAM
aggcuuacucacccuuuuuc

SEQ ID NO: 919 - RNA, 20 nt, Artificial Sequence
  targeting sequence with ATCN PAM
ccagucuccacccucuccuc

SEQ ID NO: 920 - RNA, 20 nt, Artificial Sequence
  targeting sequence with ATCN PAM
cccagaguccccuaaccuca

SEQ ID NO: 921 - RNA, 20 nt, Artificial Sequence
  targeting sequence with ATCN PAM
cagugucuccagcugggcca

SEQ ID NO: 922 - RNA, 20 nt, Artificial Sequence
  targeting sequence with ATCN PAM
gugguccaguuauaauggug

SEQ ID NO: 923 - RNA, 20 nt, Artificial Sequence
  targeting sequence with ATCN PAM
cgagcugccaccuccaggaa

SEQ ID NO: 924 - RNA, 20 nt, Artificial Sequence
  targeting sequence with ATCN PAM
gggccggcuuccuggaggug

SEQ ID NO: 925 - RNA, 20 nt, Artificial Sequence
  targeting sequence with ATCN PAM
gacugaguucccgcagcacc

SEQ ID NO: 926 - RNA, 20 nt, Artificial Sequence
  targeting sequence with ATCN PAM
cagucgccugugcucucauc

SEQ ID NO: 927 - RNA, 20 nt, Artificial Sequence
  targeting sequence with ATCN PAM
gccucccuguggacucugag

SEQ ID NO: 928 - RNA, 20 nt, Artificial Sequence
  targeting sequence with ATCN PAM
ucagaguccacagggaggca

SEQ ID NO: 929 - RNA, 20 nt, Artificial Sequence
  targeting sequence with ATCN PAM
gcccucgccucauccucaga

SEQ ID NO: 930 - RNA, 20 nt, Artificial Sequence
  targeting sequence with ATCN PAM
gagcccacggccugcccacu

SEQ ID NO: 931 - RNA, 20 nt, Artificial Sequence
  targeting sequence with ATCN PAM
ugcuccagcaccagcaaccc

SEQ ID NO: 932 - RNA, 20 nt, Artificial Sequence
  targeting sequence with ATCN PAM
agagaguggggcacugagag

SEQ ID NO: 933 - RNA, 20 nt, Artificial Sequence
  targeting sequence with ATCN PAM
uuguccuucucuccuccaua

SEQ ID NO: 934 - RNA, 20 nt, Artificial Sequence
  targeting sequence with ATCN PAM
uauggaaccacugucaugua

SEQ ID NO: 935 - RNA, 20 nt, Artificial Sequence
  targeting sequence with ATCN PAM
cauccccugugacuugcacg

SEQ ID NO: 936 - RNA, 20 nt, Artificial Sequence
  targeting sequence with ATCN PAM
ccugugacuugcacguauac

SEQ ID NO: 937 - RNA, 20 nt, Artificial Sequence
  targeting sequence with ATCN PAM
gggcguauacgugcaaguca

SEQ ID NO: 938 - RNA, 20 nt, Artificial Sequence
  targeting sequence with ATCN PAM
caaaagaagugaauaugccc

SEQ ID NO: 939 - RNA, 20 nt, Artificial Sequence
  targeting sequence with ATCN PAM
guuaagguggggcagggcau

SEQ ID NO: 940 - RNA, 20 nt, Artificial Sequence
  targeting sequence with ATCN PAM
guuaaggcaaggaccagcca

SEQ ID NO: 941 - RNA, 20 nt, Artificial Sequence
  targeting sequence with ATCN PAM
uggcucaaaaagcaccucca

SEQ ID NO: 942 - RNA, 20 nt, Artificial Sequence
  targeting sequence with ATCN PAM
uauaaaacggcccuacccuu

SEQ ID NO: 943 - RNA, 20 nt, Artificial Sequence
  targeting sequence with ATCN PAM
cccuucgcugacucucuuuu

SEQ ID NO: 944 - RNA, 20 nt, Artificial Sequence
  targeting sequence with ATCN PAM
gugugaagagaccaccaaac

SEQ ID NO: 945 - RNA, 20 nt, Artificial Sequence
  targeting sequence with ATCN PAM
gaguaacggcaccaaauuuc

SEQ ID NO: 946 - RNA, 20 nt, Artificial Sequence
  targeting sequence with ATCN PAM
ggggaccucccuugggagau

SEQ ID NO: 947 - RNA, 20 nt, Artificial Sequence
  targeting sequence with ATCN PAM
cccaagggaggucccccgau

SEQ ID NO: 948 - RNA, 20 nt, Artificial Sequence
  targeting sequence with ATCN PAM
auccccuguccuccugcucu

SEQ ID NO: 949 - RNA, 20 nt, Artificial Sequence
  targeting sequence with ATCN PAM
ccuguccuccugcucuuugc

SEQ ID NO: 950 - RNA, 20 nt, Artificial Sequence
  targeting sequence with ATCN PAM
uucucauggagcaaagagca

SEQ ID NO: 951 - RNA, 20 nt, Artificial Sequence
  targeting sequence with ATCN PAM
accuacgaccucagguccuc

SEQ ID NO: 952 - RNA, 20 nt, Artificial Sequence
  targeting sequence with ATCN PAM
caccaauuucaaguccggua

SEQ ID NO: 953 - RNA, 20 nt, Artificial Sequence
  targeting sequence with ATCN PAM
cucaaccucuuucuccuuuc

SEQ ID NO: 954 - RNA, 20 nt, Artificial Sequence
  targeting sequence with ATCN PAM
uggcgccacacuucaaucuc

SEQ ID NO: 955 - RNA, 20 nt, Artificial Sequence
  targeting sequence with ATCN PAM
cucccuucucuuaauuucaa

SEQ ID NO: 956 - RNA, 20 nt, Artificial Sequence
  targeting sequence with ATCN PAM
augaacccaaaaccccggug

SEQ ID NO: 957 - RNA, 20 nt, Artificial Sequence
  targeting sequence with ATCN PAM
uugcagggaugccucucuga

SEQ ID NO: 958 - RNA, 20 nt, Artificial Sequence
  targeting sequence with ATCN PAM
cugcaaugauuaaacaccaa

SEQ ID NO: 959 - RNA, 20 nt, Artificial Sequence
  targeting sequence with ATCN PAM
gagaggcaucccugcaauga

SEQ ID NO: 960 - RNA, 20 nt, Artificial Sequence
  targeting sequence with ATCN PAM
acucacguuucaaggguguc

SEQ ID NO: 961 - RNA, 20 nt, Artificial Sequence
  targeting sequence with ATCN PAM
cuuauuuccgcaccccaacc

SEQ ID NO: 962 - RNA, 20 nt, Artificial Sequence
  targeting sequence with ATCN PAM
cugugccccaaucccuuauu

SEQ ID NO: 963 - RNA, 20 nt, Artificial Sequence
  targeting sequence with ATCN PAM
cuuauuuccgcacccugacc

SEQ ID NO: 964 - RNA, 20 nt, Artificial Sequence
  targeting sequence with ATCN PAM
cugugccccaaucccuuauu

SEQ ID NO: 965 - RNA, 20 nt, Artificial Sequence
  targeting sequence with ATCN PAM
cuuauuuccgugucccaacc

SEQ ID NO: 966 - RNA, 20 nt, Artificial Sequence
  targeting sequence with ATCN PAM
aaagugccguuuucuggcca

SEQ ID NO: 967 - RNA, 20 nt, Artificial Sequence
  targeting sequence with ATCN PAM
uacaagaccuaaauaauuuu

SEQ ID NO: 968 - RNA, 20 nt, Artificial Sequence
  targeting sequence with ATCN PAM
gggaggaauugcauugggaa

SEQ ID NO: 969 - RNA, 20 nt, Artificial Sequence
  targeting sequence with ATCN PAM
uccuucuuucccucccgccu

SEQ ID NO: 970 - RNA, 20 nt, Artificial Sequence
  targeting sequence with ATCN PAM
gaccuuuccccuccucccca

SEQ ID NO: 971 - RNA, 20 nt, Artificial Sequence
  targeting sequence with ATCN PAM
ccaggccgagcuaaguccca

SEQ ID NO: 972 - RNA, 20 nt, Artificial Sequence
  targeting sequence with ATCN PAM
uuuuaucaccuccccuccuc

SEQ ID NO: 973 - RNA, 20 nt, Artificial Sequence
  targeting sequence with ATCN PAM
ccuccccuccucacacccga

SEQ ID NO: 974 - RNA, 20 nt, Artificial Sequence
  targeting sequence with ATCN PAM
ggugugaggaggggagguga

SEQ ID NO: 975 - RNA, 20 nt, Artificial Sequence
  targeting sequence with ATCN PAM
ggcucacaguuucguuccgu

SEQ ID NO: 976 - RNA, 20 nt, Artificial Sequence
  targeting sequence with ATCN PAM
accuuuuuaagaguaaauug

SEQ ID NO: 977 - RNA, 20 nt, Artificial Sequence
  targeting sequence with ATCN PAM
caaaucagauagcauuuagg

SEQ ID NO: 978 - RNA, 20 nt, Artificial Sequence
  targeting sequence with ATCN PAM
gauagcauuuaggcucuuuu

SEQ ID NO: 979 - RNA, 20 nt, Artificial Sequence
  targeting sequence with ATCN PAM
gauuugggauaaagaaaaag

SEQ ID NO: 980 - RNA, 20 nt, Artificial Sequence
  targeting sequence with ATCN PAM
aauauaaaaauccagcccag

SEQ ID NO: 981 - RNA, 20 nt, Artificial Sequence
  targeting sequence with ATCN PAM
agcccaguucaugacucguu

SEQ ID NO: 982 - RNA, 20 nt, Artificial Sequence
  targeting sequence with ATCN PAM
acuccugacauuaaauaaaa

SEQ ID NO: 983 - RNA, 20 nt, Artificial Sequence
  targeting sequence with ATCN PAM
uguugugagguuugagggcu

SEQ ID NO: 984 - RNA, 20 nt, Artificial Sequence
  targeting sequence with ATCN PAM
ccagcacacaagaacuucca

SEQ ID NO: 985 - RNA, 20 nt, Artificial Sequence
  targeting sequence with ATCN PAM
ggccacugggccaaggaaug

SEQ ID NO: 986 - RNA, 20 nt, Artificial Sequence
  targeting sequence with ATCN PAM
cgggcugcgggcauuccuug

SEQ ID NO: 987 - RNA, 20 nt, Artificial Sequence
  targeting sequence with ATCN PAM
gugugggaccccacugaaaa

SEQ ID NO: 988 - RNA, 20 nt, Artificial Sequence
  targeting sequence with ATCN PAM
gacuguucaacucaccuggc

SEQ ID NO: 989 - RNA, 20 nt, Artificial Sequence
  targeting sequence with ATCN PAM
gggaaggagucagucagaga

SEQ ID NO: 990 - RNA, 20 nt, Artificial Sequence
  targeting sequence with ATCN PAM
ucucggcuuagcggcugaag

SEQ ID NO: 991 - RNA, 20 nt, Artificial Sequence
  targeting sequence with ATCN PAM
ggcagugucagucuucagcc

SEQ ID NO: 992 - RNA, 20 nt, Artificial Sequence
  targeting sequence with ATCN PAM
ccucggaagcccccagacca

SEQ ID NO: 993 - RNA, 20 nt, Artificial Sequence
  targeting sequence with ATCN PAM
cggacgccgagcuuugggua

SEQ ID NO: 994 - RNA, 20 nt, Artificial Sequence
  targeting sequence with ATCN PAM
auacggaggcuacucacucc

SEQ ID NO: 995 - RNA, 20 nt, Artificial Sequence
  targeting sequence with ATCN PAM
ccaccugcccaguucccuua

SEQ ID NO: 996 - RNA, 20 nt, Artificial Sequence
  targeting sequence with ATCN PAM
gcuucccugacuauuccugg

SEQ ID NO: 997 - RNA, 20 nt, Artificial Sequence
  targeting sequence with ATCN PAM
cauugccgcccuucuuccca

SEQ ID NO: 998 - RNA, 20 nt, Artificial Sequence
  targeting sequence with ATCN PAM
aaagccuccuuuguguccuc

SEQ ID NO: 999 - RNA, 20 nt, Artificial Sequence
  targeting sequence with ATCN PAM
uauacuuguggguuaaggug

SEQ ID NO: 1000 - RNA, 20 nt, Artificial Sequence
  targeting sequence with ATCN PAM
ugcaccccuuaccaucucau

SEQ ID NO: 1001 - RNA, 20 nt, Artificial Sequence
  targeting sequence with ATCN PAM
cauuaaaaccuaaucacccu

SEQ ID NO: 1002 - RNA, 20 nt, Artificial Sequence
  targeting sequence with ATCN PAM
cccuuaccccacucaaugcc

SEQ ID NO: 1003 - RNA, 20 nt, Artificial Sequence
  targeting sequence with ATCN PAM
caucccgcagcacgcuuuaa

SEQ ID NO: 1004 - RNA, 20 nt, Artificial Sequence
  targeting sequence with ATCN PAM
cgcagcacgcuuuaaaaaga

SEQ ID NO: 1005 - RNA, 20 nt, Artificial Sequence
  targeting sequence with ATCN PAM
uuuuaaagcgugcugcggga

SEQ ID NO: 1006 - RNA, 20 nt, Artificial Sequence
  targeting sequence with ATCN PAM
cuugccugcuacagcauggc

SEQ ID NO: 1007 - RNA, 20 nt, Artificial Sequence
  targeting sequence with ATCN PAM
ugaacuaacuuguaaggcuu

SEQ ID NO: 1008 - RNA, 20 nt, Artificial Sequence
  targeting sequence with ATCN PAM
gcgccuuaucaaccaaauug

SEQ ID NO: 1009 - RNA, 20 nt, Artificial Sequence
  targeting sequence with ATCN PAM
accaaauuguuuugccuauc

SEQ ID NO: 1010 - RNA, 20 nt, Artificial Sequence
  targeting sequence with ATCN PAM
accccguggugccaaaccca

SEQ ID NO: 1011 - RNA, 20 nt, Artificial Sequence
  targeting sequence with ATCN PAM
ucaauaccugccucuauaac

SEQ ID NO: 1012 - RNA, 20 nt, Artificial Sequence
  targeting sequence with ATCN PAM
agaacagaauaauggguuau

SEQ ID NO: 1013 - RNA, 20 nt, Artificial Sequence
  targeting sequence with ATCN PAM
caaacaugcuuucuuuacua

SEQ ID NO: 1014 - RNA, 20 nt, Artificial Sequence
  targeting sequence with ATCN PAM
cagccucucuucacuuucac

SEQ ID NO: 1015 - RNA, 20 nt, Artificial Sequence
  targeting sequence with ATCN PAM
agcucagcacauuaccuagg

SEQ ID NO: 1016 - RNA, 20 nt, Artificial Sequence
  targeting sequence with ATCN PAM
agcccaaauuucuuccucau

SEQ ID NO: 1017 - RNA, 20 nt, Artificial Sequence
  targeting sequence with ATCN PAM
guuaccuaucuuggcguaau

SEQ ID NO: 1018 - RNA, 20 nt, Artificial Sequence
  targeting sequence with ATCN PAM
uggcguaauucucauaaaaa

SEQ ID NO: 1019 - RNA, 20 nt, Artificial Sequence
  targeting sequence with ATCN PAM
uguccgacugaucucucaaa

SEQ ID NO: 1020 - RNA, 20 nt, Artificial Sequence
  targeting sequence with ATCN PAM
gucggacacgauuggcaggg

SEQ ID NO: 1021 - RNA, 20 nt, Artificial Sequence
  targeting sequence with ATCN PAM
cucaaaccccagcaccuucu

SEQ ID NO: 1022 - RNA, 20 nt, Artificial Sequence
  targeting sequence with ATCN PAM
caaacuaugcucaacucacu

SEQ ID NO: 1023 - RNA, 20 nt, Artificial Sequence
  targeting sequence with ATCN PAM
auuuucuuccucauaccuga

SEQ ID NO: 1024 - RNA, 20 nt, Artificial Sequence
  targeting sequence with ATCN PAM
ggccucccacauuauuccug

SEQ ID NO: 1025 - RNA, 20 nt, Artificial Sequence
  targeting sequence with ATCN PAM
ggaauaaugugggaggccag

SEQ ID NO: 1026 - RNA, 20 nt, Artificial Sequence
  targeting sequence with ATCN PAM
cucugauccaccugacauuc

SEQ ID NO: 1027 - RNA, 20 nt, Artificial Sequence
  targeting sequence with ATCN PAM
gagagauacagucguggggg

SEQ ID NO: 1028 - RNA, 20 nt, Artificial Sequence
  targeting sequence with ATCN PAM
accugacauucaccccauuu

SEQ ID NO: 1029 - RNA, 20 nt, Artificial Sequence
  targeting sequence with ATCN PAM
gggugaggaacaggaaagaa

SEQ ID NO: 1030 - RNA, 20 nt, Artificial Sequence
  targeting sequence with ATCN PAM
ugcuugauuuauugauggca

SEQ ID NO: 1031 - RNA, 20 nt, Artificial Sequence
  targeting sequence with ATCN PAM
agcaugaucagggugaggaa

SEQ ID NO: 1032 - RNA, 20 nt, Artificial Sequence
  targeting sequence with ATCN PAM
auaaaucaagcaugaucagg

SEQ ID NO: 1033 - RNA, 20 nt, Artificial Sequence
  targeting sequence with ATCN PAM
ccacacaccagcaaaggcag

SEQ ID NO: 1034 - RNA, 20 nt, Artificial Sequence
  targeting sequence with ATCN PAM
uggaaaucuauccucaagga

SEQ ID NO: 1035 - RNA, 20 nt, Artificial Sequence
  targeting sequence with ATCN PAM
auccucaaggaaauaacuuc

SEQ ID NO: 1036 - RNA, 20 nt, Artificial Sequence
  targeting sequence with ATCN PAM
ucaaggaaauaacuucucag

SEQ ID NO: 1037 - RNA, 20 nt, Artificial Sequence
  targeting sequence with ATCN PAM
gcuauucuacuacuccucag

SEQ ID NO: 1038 - RNA, 20 nt, Artificial Sequence
  targeting sequence with ATCN PAM
cugaggaguaguagaauagc

SEQ ID NO: 1039 - RNA, 20 nt, Artificial Sequence
  targeting sequence with ATCN PAM
agcucgaggauuugccccac

SEQ ID NO: 1040 - RNA, 20 nt, Artificial Sequence
  targeting sequence with ATCN PAM
ucgagcuugauguguaggga

SEQ ID NO: 1041 - RNA, 20 nt, Artificial Sequence
  targeting sequence with ATCN PAM
gacucaggcauguugaguaa

SEQ ID NO: 1042 - RNA, 20 nt, Artificial Sequence
  targeting sequence with ATCN PAM
aguaacuaaaauaccuccag

SEQ ID NO: 1043 - RNA, 20 nt, Artificial Sequence
  targeting sequence with ATCN PAM
cuucccuucugucagacaca

SEQ ID NO: 1044 - RNA, 20 nt, Artificial Sequence
  targeting sequence with ATCN PAM
gacuguauugaggugggaag

SEQ ID NO: 1045 - RNA, 20 nt, Artificial Sequence
  targeting sequence with ATCN PAM
guuaucagacuguauugagg

SEQ ID NO: 1046 - RNA, 20 nt, Artificial Sequence
  targeting sequence with ATCN PAM
gccaagcauuuuuucaggcu

SEQ ID NO: 1047 - RNA, 20 nt, Artificial Sequence
  targeting sequence with ATCN PAM
cuuacgguccuccgucuuca

SEQ ID NO: 1048 - RNA, 20 nt, Artificial Sequence
  targeting sequence with ATCN PAM
cuuucccuucucagaauuca

SEQ ID NO: 1049 - RNA, 20 nt, Artificial Sequence
  targeting sequence with ATCN PAM
cuacuaucuucugucuaguc

SEQ ID NO: 1050 - RNA, 20 nt, Artificial Sequence
  targeting sequence with ATCN PAM
ucugucuagucauacuccua

SEQ ID NO: 1051 - RNA, 20 nt, Artificial Sequence
  targeting sequence with ATCN PAM
cagcugauaucucccggugg

SEQ ID NO: 1052 - RNA, 20 nt, Artificial Sequence
  targeting sequence with ATCN PAM
gcugugauggcuuggagaaa

SEQ ID NO: 1053 - RNA, 20 nt, Artificial Sequence
  targeting sequence with ATCN PAM
cccggugguaucccaaaacu

SEQ ID NO: 1054 - RNA, 20 nt, Artificial Sequence
  targeting sequence with ATCN PAM
caaaacugccacucuuaacu

SEQ ID NO: 1055 - RNA, 20 nt, Artificial Sequence
  targeting sequence with ATCN PAM
uugcuggcaggacuaugcug

SEQ ID NO: 1056 - RNA, 20 nt, Artificial Sequence
  targeting sequence with ATCN PAM
ccuuaggcacucucuaauua

SEQ ID NO: 1057 - RNA, 20 nt, Artificial Sequence
  targeting sequence with ATCN PAM
aauuagagagugccuaagga

SEQ ID NO: 1058 - RNA, 20 nt, Artificial Sequence
  targeting sequence with ATCN PAM
aggccaucaccaaucauucu

SEQ ID NO: 1059 - RNA, 20 nt, Artificial Sequence
  targeting sequence with ATCN PAM
ccaaucauucuauacgacaa

SEQ ID NO: 1060 - RNA, 20 nt, Artificial Sequence
  targeting sequence with ATCN PAM
uucuauacgacaaacguuuc

SEQ ID NO: 1061 - RNA, 20 nt, Artificial Sequence
  targeting sequence with ATCN PAM
ccacaauaucaccccuuacc

SEQ ID NO: 1062 - RNA, 20 nt, Artificial Sequence
  targeting sequence with ATCN PAM
ccccuuaccacaagaucucc

SEQ ID NO: 1063 - RNA, 20 nt, Artificial Sequence
  targeting sequence with ATCN PAM
ugugguaaggggugauauug

SEQ ID NO: 1064 - RNA, 20 nt, Artificial Sequence
  targeting sequence with ATCN PAM
cccuucagcuuaaucucucc

SEQ ID NO: 1065 - RNA, 20 nt, Artificial Sequence
  targeting sequence with ATCN PAM
cucccauucuagguucccac

SEQ ID NO: 1066 - RNA, 20 nt, Artificial Sequence
  targeting sequence with ATCN PAM
cgcuugaagcagcccugaga

SEQ ID NO: 1067 - RNA, 20 nt, Artificial Sequence
  targeting sequence with ATCN PAM
cccauucucucuccauacca

SEQ ID NO: 1068 - RNA, 20 nt, Artificial Sequence
  targeting sequence with ATCN PAM
cauccccugugacuugcaug

SEQ ID NO: 1069 - RNA, 20 nt, Artificial Sequence
  targeting sequence with ATCN PAM
ccugugacuugcauguauac

SEQ ID NO: 1070 - RNA, 20 nt, Artificial Sequence
  targeting sequence with ATCN PAM
gggcguauacaugcaaguca

SEQ ID NO: 1071 - RNA, 20 nt, Artificial Sequence
  targeting sequence with ATCN PAM
caaaagaagugaauaugccc

SEQ ID NO: 1072 - RNA, 20 nt, Artificial Sequence
  targeting sequence with ATCN PAM
guuaagguggggcagggcau

SEQ ID NO: 1073 - RNA, 20 nt, Artificial Sequence
  targeting sequence with ATCN PAM
guuaaggcaaggaccggcca

SEQ ID NO: 1074 - RNA, 20 nt, Artificial Sequence
  targeting sequence with ATCN PAM
uggcucaaaaagcaccccca

SEQ ID NO: 1075 - RNA, 20 nt, Artificial Sequence
  targeting sequence with ATCN PAM
ggcggguaggagugcggggu

SEQ ID NO: 1076 - RNA, 20 nt, Artificial Sequence
  targeting sequence with ATCN PAM
uauaaaacggccccacccuu

SEQ ID NO: 1077 - RNA, 20 nt, Artificial Sequence
  targeting sequence with ATCN PAM
cccuucgcugacucucuuuu

SEQ ID NO: 1078 - RNA, 20 nt, Artificial Sequence
  targeting sequence with ATCN PAM
ggugaaaauagccauuguaa

SEQ ID NO: 1079 - RNA, 20 nt, Artificial Sequence
  targeting sequence with ATCN PAM
guguagggcacuuagcauga

SEQ ID NO: 1080 - RNA, 20 nt, Artificial Sequence
  targeting sequence with ATCN PAM
aaacauagaaauaguauagu

SEQ ID NO: 1081 - RNA, 20 nt, Artificial Sequence
  targeting sequence with ATCN PAM
cggcucacugcaagcucugc

SEQ ID NO: 1082 - RNA, 20 nt, Artificial Sequence
  targeting sequence with ATCN PAM
uggcuaacauggugaaaacc

SEQ ID NO: 1083 - RNA, 20 nt, Artificial Sequence
  targeting sequence with ATCN PAM
agaccauccuggcuaacaug

SEQ ID NO: 1084 - RNA, 20 nt, Artificial Sequence
  targeting sequence with ATCN PAM
ccugaccucgugauccaccc

SEQ ID NO: 1085 - RNA, 20 nt, Artificial Sequence
  targeting sequence with ATCN PAM
cgaggucaggagaucgagac

SEQ ID NO: 1086 - RNA, 20 nt, Artificial Sequence
  targeting sequence with ATCN PAM
acccgccucggccucccaaa

SEQ ID NO: 1087 - RNA, 20 nt, Artificial Sequence
  targeting sequence with ATCN PAM
cagcacuuugggaggccgag

SEQ ID NO: 1088 - RNA, 20 nt, Artificial Sequence
  targeting sequence with ATCN PAM
agggccgggugcgguggcuc

SEQ ID NO: 1089 - RNA, 20 nt, Artificial Sequence
  targeting sequence with ATCN PAM
cauauagucucgguguguag

SEQ ID NO: 1090 - RNA, 20 nt, Artificial Sequence
  targeting sequence with ATCN PAM
aggucuaacuauaugauauu

SEQ ID NO: 1091 - RNA, 20 nt, Artificial Sequence
  targeting sequence with ATCN PAM
uauaguuagaccuagauggg

SEQ ID NO: 1092 - RNA, 20 nt, Artificial Sequence
  targeting sequence with ATCN PAM
auaugucccuggcaauuuug

SEQ ID NO: 1093 - RNA, 20 nt, Artificial Sequence
  targeting sequence with ATCN PAM
gauuacaccggaagacuuag

SEQ ID NO: 1094 - RNA, 20 nt, Artificial Sequence
  targeting sequence with ATCN PAM
gaugacaggaacuucaauac

SEQ ID NO: 1095 - RNA, 20 nt, Artificial Sequence
  targeting sequence with ATCN PAM
cccagcaggugaaagggcua

SEQ ID NO: 1096 - RNA, 20 nt, Artificial Sequence
  targeting sequence with ATCN PAM
uagugacaagggcaagagua

SEQ ID NO: 1097 - RNA, 20 nt, Artificial Sequence
  targeting sequence with ATCN PAM
ccccuccucccagcccagac

SEQ ID NO: 1098 - RNA, 20 nt, Artificial Sequence
  targeting sequence with ATCN PAM
acccuccccacauccucgua

SEQ ID NO: 1099 - RNA, 20 nt, Artificial Sequence
  targeting sequence with ATCN PAM
ucguacuaguuauuguacuc

SEQ ID NO: 1100 - RNA, 20 nt, Artificial Sequence
  targeting sequence with ATCN PAM
cacucuacuuaaacucagcc

SEQ ID NO: 1101 - RNA, 20 nt, Artificial Sequence
  targeting sequence with ATCN PAM
caguaaaagcguauauaaua

SEQ ID NO: 1102 - RNA, 20 nt, Artificial Sequence
  targeting sequence with ATCN PAM
aguauuuuuuaaacaacucu

SEQ ID NO: 1103 - RNA, 20 nt, Artificial Sequence
  targeting sequence with ATCN PAM
cuucgucugugaaauggcaa

SEQ ID NO: 1104 - RNA, 20 nt, Artificial Sequence
  targeting sequence with ATCN PAM
uucucccccagccugccuua

SEQ ID NO: 1105 - RNA, 20 nt, Artificial Sequence
  targeting sequence with ATCN PAM
ucucccuaccugccugccug

SEQ ID NO: 1106 - RNA, 20 nt, Artificial Sequence
  targeting sequence with ATCN PAM
cccuaccugccugccugugc

SEQ ID NO: 1107 - RNA, 20 nt, Artificial Sequence
  targeting sequence with ATCN PAM
caggggaagguggaaaagga

SEQ ID NO: 1108 - RNA, 20 nt, Artificial Sequence
  targeting sequence with ATCN PAM
ucuagacaagggugcagcca

SEQ ID NO: 1109 - RNA, 20 nt, Artificial Sequence
  targeting sequence with ATCN PAM
uagugcacagguggaaggcu

SEQ ID NO: 1110 - RNA, 20 nt, Artificial Sequence
  targeting sequence with ATCN PAM
aucccuucucaccuccuaag

SEQ ID NO: 1111 - RNA, 20 nt, Artificial Sequence
  targeting sequence with ATCN PAM
cuucucaccuccuaagagau

SEQ ID NO: 1112 - RNA, 20 nt, Artificial Sequence
  targeting sequence with ATCN PAM
cuuaggaggugagaagggau

SEQ ID NO: 1113 - RNA, 20 nt, Artificial Sequence
  targeting sequence with ATCN PAM
gcucugggccaucauccauc

SEQ ID NO: 1114 - RNA, 20 nt, Artificial Sequence
  targeting sequence with ATCN PAM
uccaucuuccugcuucccca

SEQ ID NO: 1115 - RNA, 20 nt, Artificial Sequence
  targeting sequence with ATCN PAM
aucuuccugcuuccccaagg

SEQ ID NO: 1116 - RNA, 20 nt, Artificial Sequence
  targeting sequence with ATCN PAM
uccugcuuccccaaggauau

SEQ ID NO: 1117 - RNA, 20 nt, Artificial Sequence
  targeting sequence with ATCN PAM
uuggggaagcaggaagaugg

SEQ ID NO: 1118 - RNA, 20 nt, Artificial Sequence
  targeting sequence with ATCN PAM
cuuucaagguuuucccuaua

SEQ ID NO: 1119 - RNA, 20 nt, Artificial Sequence
  targeting sequence with ATCN PAM
ccaggaaggccuguguagag

SEQ ID NO: 1120 - RNA, 20 nt, Artificial Sequence
  targeting sequence with ATCN PAM
ccacauggcuaaaucagaac

SEQ ID NO: 1121 - RNA, 20 nt, Artificial Sequence
  targeting sequence with ATCN PAM
gaacaccggaccccagcauc

SEQ ID NO: 1122 - RNA, 20 nt, Artificial Sequence
  targeting sequence with ATCN PAM
gacugauuuuccuuucucac

SEQ ID NO: 1123 - RNA, 20 nt, Artificial Sequence
  targeting sequence with ATCN PAM
gucagaugcugggguccggu

SEQ ID NO: 1124 - RNA, 20 nt, Artificial Sequence
  targeting sequence with ATCN PAM
cgagggagcauguccaggag

SEQ ID NO: 1125 - RNA, 20 nt, Artificial Sequence
  targeting sequence with ATCN PAM
cugugaguccccugucauug

SEQ ID NO: 1126 - RNA, 20 nt, Artificial Sequence
  targeting sequence with ATCN PAM
acguaauucaaugacagggg

SEQ ID NO: 1127 - RNA, 20 nt, Artificial Sequence
  targeting sequence with ATCN PAM
ccccuaaguuccaugugaca

SEQ ID NO: 1128 - RNA, 20 nt, Artificial Sequence
  targeting sequence with ATCN PAM
ggugaauggcucaaacccau

SEQ ID NO: 1129 - RNA, 20 nt, Artificial Sequence
  targeting sequence with ATCN PAM
caucuguggacaaauacaaa

SEQ ID NO: 1130 - RNA, 20 nt, Artificial Sequence
  targeting sequence with ATCN PAM
guggacaaauacaaauacac

SEQ ID NO: 1131 - RNA, 20 nt, Artificial Sequence
  targeting sequence with ATCN PAM
gaggcagcagugggacucug

SEQ ID NO: 1132 - RNA, 20 nt, Artificial Sequence
  targeting sequence with ATCN PAM
aagccacuaccaguguggcu

SEQ ID NO: 1133 - RNA, 20 nt, Artificial Sequence
  targeting sequence with ATCN PAM
auuuuccaaauagcacucac

SEQ ID NO: 1134 - RNA, 20 nt, Artificial Sequence
  targeting sequence with ATCN PAM
ucaaaaauuauaaaucagau

SEQ ID NO: 1135 - RNA, 20 nt, Artificial Sequence
  targeting sequence with ATCN PAM
gaucaugucccucugauaug

SEQ ID NO: 1136 - RNA, 20 nt, Artificial Sequence
  targeting sequence with ATCN PAM
gauuuauaauuuuugaggau

SEQ ID NO: 1137 - RNA, 20 nt, Artificial Sequence
  targeting sequence with ATCN PAM
ugucccucugauaugguuuc

SEQ ID NO: 1138 - RNA, 20 nt, Artificial Sequence
  targeting sequence with ATCN PAM
gagggacaugaucugauuua

SEQ ID NO: 1139 - RNA, 20 nt, Artificial Sequence
  targeting sequence with ATCN PAM
cagcuugaauuguauuuccc

SEQ ID NO: 1140 - RNA, 20 nt, Artificial Sequence
  targeting sequence with ATCN PAM
ugggggauggucuuucccau

SEQ ID NO: 1141 - RNA, 20 nt, Artificial Sequence
  targeting sequence with ATCN PAM
cccaugauucaauuaccucc

SEQ ID NO: 1142 - RNA, 20 nt, Artificial Sequence
  targeting sequence with ATCN PAM
ccugagacuuauucacuacc

SEQ ID NO: 1143 - RNA, 20 nt, Artificial Sequence
  targeting sequence with ATCN PAM
gauggguuuaucagggguuu

SEQ ID NO: 1144 - RNA, 20 nt, Artificial Sequence
  targeting sequence with ATCN PAM
gaucuccugagacuuauuca

SEQ ID NO: 1145 - RNA, 20 nt, Artificial Sequence
  targeting sequence with ATCN PAM
gggguuuccauuuuugcuuc

SEQ ID NO: 1146 - RNA, 20 nt, Artificial Sequence
  targeting sequence with ATCN PAM
ugacgggaaacgaaaggcac

SEQ ID NO: 1147 - RNA, 20 nt, Artificial Sequence
  targeting sequence with ATCN PAM
gcagcauaaaaauggacuaa

SEQ ID NO: 1148 - RNA, 20 nt, Artificial Sequence
  targeting sequence with ATCN PAM
aguaaauugguacugagagu

SEQ ID NO: 1149 - RNA, 20 nt, Artificial Sequence
  targeting sequence with ATCN PAM
uuuaagcaacaccccacucu

SEQ ID NO: 1150 - RNA, 20 nt, Artificial Sequence
  targeting sequence with ATCN PAM
cuaugaguauuuuugucaaa

SEQ ID NO: 1151 - RNA, 20 nt, Artificial Sequence
  targeting sequence with ATCN PAM
gcccccucugagaccaccuc

SEQ ID NO: 1152 - RNA, 20 nt, Artificial Sequence
  targeting sequence with ATCN PAM
caagggcaggggcaaaaugu

SEQ ID NO: 1153 - RNA, 20 nt, Artificial Sequence
  targeting sequence with ATCN PAM
ucucucucaaguucgacguu

SEQ ID NO: 1154 - RNA, 20 nt, Artificial Sequence
  targeting sequence with ATCN PAM
gguggaagaaauuucuaagc

SEQ ID NO: 1155 - RNA, 20 nt, Artificial Sequence
  targeting sequence with ATCN PAM
ucaaaaccauggagaaaaug

SEQ ID NO: 1156 - RNA, 20 nt, Artificial Sequence
  targeting sequence with ATCN PAM
caggccuagagccccaggag

SEQ ID NO: 1157 - RNA, 20 nt, Artificial Sequence
  targeting sequence with ATCN PAM
agguggagguucccaaaccu

SEQ ID NO: 1158 - RNA, 20 nt, Artificial Sequence
  targeting sequence with ATCN PAM
aagcauuuccuacgucuucu

SEQ ID NO: 1159 - RNA, 20 nt, Artificial Sequence
  targeting sequence with ATCN PAM
cuacuggggcauugccuagu

SEQ ID NO: 1160 - RNA, 20 nt, Artificial Sequence
  targeting sequence with ATCN PAM
accauucuggggucuggagg

SEQ ID NO: 1161 - RNA, 20 nt, Artificial Sequence
  targeting sequence with ATCN PAM
acugacaacuugcacuguuc

SEQ ID NO: 1162 - RNA, 20 nt, Artificial Sequence
  targeting sequence with ATCN PAM
gcagacaaucaaugccagcc

SEQ ID NO: 1163 - RNA, 20 nt, Artificial Sequence
  targeting sequence with ATCN PAM
augccagcccaugaaagcug

SEQ ID NO: 1164 - RNA, 20 nt, Artificial Sequence
  targeting sequence with ATCN PAM
gcgugaccuggaugugagau

SEQ ID NO: 1165 - RNA, 20 nt, Artificial Sequence
  targeting sequence with ATCN PAM
aggucacgcugaugcaagag

SEQ ID NO: 1166 - RNA, 20 nt, Artificial Sequence
  targeting sequence with ATCN PAM
cacauccaggucacgcugau

SEQ ID NO: 1167 - RNA, 20 nt, Artificial Sequence
  targeting sequence with ATCN PAM
ccuuugacuccacaucucac

SEQ ID NO: 1168 - RNA, 20 nt, Artificial Sequence
  targeting sequence with ATCN PAM
uuuuggagcuuuaaaauuug

SEQ ID NO: 1169 - RNA, 20 nt, Artificial Sequence
  targeting sequence with ATCN PAM
aguggugcagucaaauuuua

SEQ ID NO: 1170 - RNA, 20 nt, Artificial Sequence
  targeting sequence with ATCN PAM
cuauuguaucuagaaaguaa

SEQ ID NO: 1171 - RNA, 20 nt, Artificial Sequence
  targeting sequence with ATCN PAM
agaaaguaaccagcuugcuu

SEQ ID NO: 1172 - RNA, 20 nt, Artificial Sequence
  targeting sequence with ATCN PAM
aaagcaagcugguuacuuuc

SEQ ID NO: 1173 - RNA, 20 nt, Artificial Sequence
  targeting sequence with ATCN PAM
gagacaaggcaagucccuuc

SEQ ID NO: 1174 - RNA, 20 nt, Artificial Sequence
  targeting sequence with ATCN PAM
ugccuucccaacagucucuc

SEQ ID NO: 1175 - RNA, 20 nt, Artificial Sequence
  targeting sequence with ATCN PAM
uucugccccugaccccucca

SEQ ID NO: 1176 - RNA, 20 nt, Artificial Sequence
  targeting sequence with ATCN PAM
uggggcuggucuuucccaug

SEQ ID NO: 1177 - RNA, 20 nt, Artificial Sequence
  targeting sequence with ATCN PAM
cgagaauagcaugggaaaga

SEQ ID NO: 1178 - RNA, 20 nt, Artificial Sequence
  targeting sequence with ATCN PAM
uaugagacuuauucacuauc

SEQ ID NO: 1179 - RNA, 20 nt, Artificial Sequence
  targeting sequence with ATCN PAM
gaugggauuaucagggguuu

SEQ ID NO: 1180 - RNA, 20 nt, Artificial Sequence
  targeting sequence with ATCN PAM
gauccuaugagacuuauuca

SEQ ID NO: 1181 - RNA, 20 nt, Artificial Sequence
  targeting sequence with ATCN PAM
caucagauccuaugagacuu

SEQ ID NO: 1182 - RNA, 20 nt, Artificial Sequence
  targeting sequence with ATCN PAM
gggguuucugcuuuuguauc

SEQ ID NO: 1183 - RNA, 20 nt, Artificial Sequence
  targeting sequence with ATCN PAM
uuuuuauuuucucuugcugu

SEQ ID NO: 1184 - RNA, 20 nt, Artificial Sequence
  targeting sequence with ATCN PAM
cggcaggaggcgaaaagcac

SEQ ID NO: 1185 - RNA, 20 nt, Artificial Sequence
  targeting sequence with ATCN PAM
gcagcaugaaaacgaacuaa

SEQ ID NO: 1186 - RNA, 20 nt, Artificial Sequence
  targeting sequence with ATCN PAM
cugggcuguuccagucuggg

SEQ ID NO: 1187 - RNA, 20 nt, Artificial Sequence
  targeting sequence with ATCN PAM
ccaucucacacaguacaugu

SEQ ID NO: 1188 - RNA, 20 nt, Artificial Sequence
  targeting sequence with ATCN PAM
cacacaguacauguuugauu

SEQ ID NO: 1189 - RNA, 20 nt, Artificial Sequence
  targeting sequence with ATCN PAM
aacauguacugugugagaug

SEQ ID NO: 1190 - RNA, 20 nt, Artificial Sequence
  targeting sequence with ATCN PAM
cugccccugugcagcccucc

SEQ ID NO: 1191 - RNA, 20 nt, Artificial Sequence
  targeting sequence with ATCN PAM
auagaaucccugccccugug

SEQ ID NO: 1192 - RNA, 20 nt, Artificial Sequence
  targeting sequence with ATCN PAM
uguucacugccauacccagc

SEQ ID NO: 1193 - RNA, 20 nt, Artificial Sequence
  targeting sequence with ATCN PAM
agaacagucccugguacaua

SEQ ID NO: 1194 - RNA, 20 nt, Artificial Sequence
  targeting sequence with ATCN PAM
cuagcaccaagcuagagccu

SEQ ID NO: 1195 - RNA, 20 nt, Artificial Sequence
  targeting sequence with ATCN PAM
uuggcaucccuagcaccaag

SEQ ID NO: 1196 - RNA, 20 nt, Artificial Sequence
  targeting sequence with ATCN PAM
gucuuccccacgggucguga

SEQ ID NO: 1197 - RNA, 20 nt, Artificial Sequence
  targeting sequence with ATCN PAM
gucaccuuccauguagcccc

SEQ ID NO: 1198 - RNA, 20 nt, Artificial Sequence
  targeting sequence with ATCN PAM
cacagcuaugggucagagug

SEQ ID NO: 1199 - RNA, 20 nt, Artificial Sequence
  targeting sequence with ATCN PAM
cuguuuaauagacaagaaaa

SEQ ID NO: 1200 - RNA, 20 nt, Artificial Sequence
  targeting sequence with ATCN PAM
ucucuguuuaauagacaaga

SEQ ID NO: 1201 - RNA, 20 nt, Artificial Sequence
  targeting sequence with ATCN PAM
uuccugucucauucgcccca

SEQ ID NO: 1202 - RNA, 20 nt, Artificial Sequence
  targeting sequence with ATCN PAM
uaaaauaaacauggcuccuc

SEQ ID NO: 1203 - RNA, 20 nt, Artificial Sequence
  targeting sequence with ATCN PAM
cggcucaccgcaaccucugc

SEQ ID NO: 1204 - RNA, 20 nt, Artificial Sequence
  targeting sequence with ATCN PAM
cagcuacuagggaggcuggg

SEQ ID NO: 1205 - RNA, 20 nt, Artificial Sequence
  targeting sequence with ATCN PAM
cuacuaaaauacaaaaauua

SEQ ID NO: 1206 - RNA, 20 nt, Artificial Sequence
  targeting sequence with ATCN PAM
auugaggucaggaguucgag

SEQ ID NO: 1207 - RNA, 20 nt, Artificial Sequence
  targeting sequence with ATCN PAM
gucugccucggacucccaaa

SEQ ID NO: 1208 - RNA, 20 nt, Artificial Sequence
  targeting sequence with ATCN PAM
cagcauuuugggaguccgag

SEQ ID NO: 1209 - RNA, 20 nt, Artificial Sequence
  targeting sequence with ATCN PAM
uguuuaaaauuguaaaauag

SEQ ID NO: 1210 - RNA, 20 nt, Artificial Sequence
  targeting sequence with ATCN PAM
agacucucuuauaauuccau

SEQ ID NO: 1211 - RNA, 20 nt, Artificial Sequence
  targeting sequence with ATCN PAM
uauguuguuuaugcagagac

SEQ ID NO: 1212 - RNA, 20 nt, Artificial Sequence
  targeting sequence with ATCN PAM
cauuucaauaaagugguuac

SEQ ID NO: 1213 - RNA, 20 nt, Artificial Sequence
  targeting sequence with ATCN PAM
uaacaugcuguuuaaaaguu

SEQ ID NO: 1214 - RNA, 20 nt, Artificial Sequence
  targeting sequence with ATCN PAM
auaacuuuuaaacagcaugu

SEQ ID NO: 1215 - RNA, 20 nt, Artificial Sequence
  targeting sequence with ATCN PAM
uuccaugucaauauauaaac

SEQ ID NO: 1216 - RNA, 20 nt, Artificial Sequence
  targeting sequence with ATCN PAM
caccauaugaacagacuaaa

SEQ ID NO: 1217 - RNA, 20 nt, Artificial Sequence
  targeting sequence with ATCN PAM
gucccuccauugaugaaugu

SEQ ID NO: 1218 - RNA, 20 nt, Artificial Sequence
  targeting sequence with ATCN PAM
auggagggacagauuuuagu

SEQ ID NO: 1219 - RNA, 20 nt, Artificial Sequence
  targeting sequence with ATCN PAM
aaacauucaucaauggaggg

SEQ ID NO: 1220 - RNA, 20 nt, Artificial Sequence
  targeting sequence with ATCN PAM
gccagggugucauauauuac

SEQ ID NO: 1221 - RNA, 20 nt, Artificial Sequence
  targeting sequence with ATCN PAM
aagugagaguuuuauuagag

SEQ ID NO: 1222 - RNA, 20 nt, Artificial Sequence
  targeting sequence with ATCN PAM
acauguugcagucggagcca

SEQ ID NO: 1223 - RNA, 20 nt, Artificial Sequence
  targeting sequence with ATCN PAM
ggucccgcugcugggagcca

SEQ ID NO: 1224 - RNA, 20 nt, Artificial Sequence
  targeting sequence with ATCN PAM
ugggccauugggccagcucc

SEQ ID NO: 1225 - RNA, 20 nt, Artificial Sequence
  targeting sequence with ATCN PAM
uugaaugguggguguacauc

SEQ ID NO: 1226 - RNA, 20 nt, Artificial Sequence
  targeting sequence with ATCN PAM
cugggguccuugcuagauua

SEQ ID NO: 1227 - RNA, 20 nt, Artificial Sequence
  targeting sequence with ATCN PAM
agcaaggaccccagcgaugu

SEQ ID NO: 1228 - RNA, 20 nt, Artificial Sequence
  targeting sequence with ATCN PAM
uugugcaaacggagagcaac

SEQ ID NO: 1229 - RNA, 20 nt, Artificial Sequence
  targeting sequence with ATCN PAM
uuaguaccucuuuguccacu

SEQ ID NO: 1230 - RNA, 20 nt, Artificial Sequence
  targeting sequence with ATCN PAM
uaaggaaauaauuaggcaag

SEQ ID NO: 1231 - RNA, 20 nt, Artificial Sequence
  targeting sequence with ATCN PAM
aauagcuaggucaguauaua

SEQ ID NO: 1232 - RNA, 20 nt, Artificial Sequence
  targeting sequence with ATCN PAM
cuagucaguagcaaacugug

SEQ ID NO: 1233 - RNA, 20 nt, Artificial Sequence
  targeting sequence with ATCN PAM
aauucuggcuguuuuuguac

SEQ ID NO: 1234 - RNA, 20 nt, Artificial Sequence
  targeting sequence with ATCN PAM
gggagaaaaaaugaguuacg

SEQ ID NO: 1235 - RNA, 20 nt, Artificial Sequence
  targeting sequence with ATCN PAM
caguggaagccaagauauua

SEQ ID NO: 1236 - RNA, 20 nt, Artificial Sequence
  targeting sequence with ATCN PAM
uggcuuccacugggauuuac

SEQ ID NO: 1237 - RNA, 20 nt, Artificial Sequence
  targeting sequence with ATCN PAM
uuuuuuaauaucuuggcuuc

SEQ ID NO: 1238 - RNA, 20 nt, Artificial Sequence
  targeting sequence with ATCN PAM
uauaaaaauuguccuccuuu

SEQ ID NO: 1239 - RNA, 20 nt, Artificial Sequence
  targeting sequence with ATCN PAM
ugauaaggaggaggccuuuc

SEQ ID NO: 1240 - RNA, 20 nt, Artificial Sequence
  targeting sequence with ATCN PAM
agaucauauaaaaauugucc

SEQ ID NO: 1241 - RNA, 20 nt, Artificial Sequence
  targeting sequence with ATCN PAM
agaagucaugaaauaaaagg

SEQ ID NO: 1242 - RNA, 20 nt, Artificial Sequence
  targeting sequence with ATCN PAM
gccuuuuauuucaugacuuc

SEQ ID NO: 1243 - RNA, 20 nt, Artificial Sequence
  targeting sequence with ATCN PAM
aucaacaaacuggaaaauag

SEQ ID NO: 1244 - RNA, 20 nt, Artificial Sequence
  targeting sequence with ATCN PAM
acaaacuggaaaauagauuu

SEQ ID NO: 1245 - RNA, 20 nt, Artificial Sequence
  targeting sequence with ATCN PAM
auuuuccaguuuguugauug

SEQ ID NO: 1246 - RNA, 20 nt, Artificial Sequence
  targeting sequence with ATCN PAM
ucaaacaaaagcuccacagc

SEQ ID NO: 1247 - RNA, 20 nt, Artificial Sequence
  targeting sequence with ATCN PAM
aacaaaagcuccacagccaa

SEQ ID NO: 1248 - RNA, 20 nt, Artificial Sequence
  targeting sequence with ATCN PAM
acauuuguuugucuuugaac

SEQ ID NO: 1249 - RNA, 20 nt, Artificial Sequence
  targeting sequence with ATCN PAM
caccaagugcccagaaggag

SEQ ID NO: 1250 - RNA, 20 nt, Artificial Sequence
  targeting sequence with ATCN PAM
uucagaacauugcugaacac

SEQ ID NO: 1251 - RNA, 20 nt, Artificial Sequence
  targeting sequence with ATCN PAM
gucugguucuggggugaggg

SEQ ID NO: 1252 - RNA, 20 nt, Artificial Sequence
  targeting sequence with ATCN PAM
aggacuuugcuucacuacuu

SEQ ID NO: 1253 - RNA, 20 nt, Artificial Sequence
  targeting sequence with ATCN PAM
caggggcuugaaaugucaaa

SEQ ID NO: 1254 - RNA, 20 nt, Artificial Sequence
  targeting sequence with ATCN PAM
gaauaggcuagguucugcuu

SEQ ID NO: 1255 - RNA, 20 nt, Artificial Sequence
  targeting sequence with ATCN PAM
aucagaauaggcuagguucu

SEQ ID NO: 1256 - RNA, 20 nt, Artificial Sequence
  targeting sequence with ATCN PAM
ucaauauagagcauucaugu

SEQ ID NO: 1257 - RNA, 20 nt, Artificial Sequence
  targeting sequence with ATCN PAM
auauagagcauucaugugcc

SEQ ID NO: 1258 - RNA, 20 nt, Artificial Sequence
  targeting sequence with ATCN PAM
cgaaauuccacuuccaggaa

SEQ ID NO: 1259 - RNA, 20 nt, Artificial Sequence
  targeting sequence with ATCN PAM
guuucauaaauuccuggaag

SEQ ID NO: 1260 - RNA, 20 nt, Artificial Sequence
  targeting sequence with ATCN PAM
auagcuguuugcacauguga

SEQ ID NO: 1261 - RNA, 20 nt, Artificial Sequence
  targeting sequence with ATCN PAM
aaguugccaugucuguccuu

SEQ ID NO: 1262 - RNA, 20 nt, Artificial Sequence
  targeting sequence with ATCN PAM
gcaaccagaaaaauaaggca

SEQ ID NO: 1263 - RNA, 20 nt, Artificial Sequence
  targeting sequence with ATCN PAM
acugccuuauuuuucugguu

SEQ ID NO: 1264 - RNA, 20 nt, Artificial Sequence
  targeting sequence with ATCN PAM
cggaauaaaaaccacacugg

SEQ ID NO: 1265 - RNA, 20 nt, Artificial Sequence
  targeting sequence with ATCN PAM
gacgucuuaaccuagcccua

SEQ ID NO: 1266 - RNA, 20 nt, Artificial Sequence
  targeting sequence with ATCN PAM
uaaacuauuuuuacaauuuu

SEQ ID NO: 1267 - RNA, 20 nt, Artificial Sequence
  targeting sequence with ATCN PAM
aaguaguuuuauaaaaguag

SEQ ID NO: 1268 - RNA, 20 nt, Artificial Sequence
  targeting sequence with ATCN PAM
ccgaaaagauacccaauaaa

SEQ ID NO: 1269 - RNA, 20 nt, Artificial Sequence
  targeting sequence with ATCN PAM
uuucggagauagucuacuuu

SEQ ID NO: 1270 - RNA, 20 nt, Artificial Sequence
  targeting sequence with ATCN PAM
gcgccuccauuguuacauag

SEQ ID NO: 1271 - RNA, 20 nt, Artificial Sequence
  targeting sequence with ATCN PAM
cuccccuuucucuucugaua

SEQ ID NO: 1272 - RNA, 20 nt, Artificial Sequence
  targeting sequence with ATCN PAM
gaagagaaaggggagagaua

SEQ ID NO: 1273 - RNA, 20 nt, Artificial Sequence
  targeting sequence with ATCN PAM
gucauuggauuuagggacca

SEQ ID NO: 1274 - RNA, 20 nt, Artificial Sequence
  targeting sequence with ATCN PAM
aaugacugauaucagaagag

SEQ ID NO: 1275 - RNA, 20 nt, Artificial Sequence
  targeting sequence with ATCN PAM
uaaacccaggauaaucuccu

SEQ ID NO: 1276 - RNA, 20 nt, Artificial Sequence
  targeting sequence with ATCN PAM
uggguuuaggauggucccua

SEQ ID NO: 1277 - RNA, 20 nt, Artificial Sequence
  targeting sequence with ATCN PAM
ccucaugagauccuuagguc

SEQ ID NO: 1278 - RNA, 20 nt, Artificial Sequence
  targeting sequence with ATCN PAM
caugaggagauuauccuggg

SEQ ID NO: 1279 - RNA, 20 nt, Artificial Sequence
  targeting sequence with ATCN PAM
uuaggucaauuacaucugca

SEQ ID NO: 1280 - RNA, 20 nt, Artificial Sequence
  targeting sequence with ATCN PAM
gcaaagaucucauuuccaaa

SEQ ID NO: 1281 - RNA, 20 nt, Artificial Sequence
  targeting sequence with ATCN PAM
uugcagauguaauugaccua

SEQ ID NO: 1282 - RNA, 20 nt, Artificial Sequence
  targeting sequence with ATCN PAM
cauuuccaaauaaggucaca

SEQ ID NO: 1283 - RNA, 20 nt, Artificial Sequence
  targeting sequence with ATCN PAM
uuuugggggacacgauucaa

SEQ ID NO: 1284 - RNA, 20 nt, Artificial Sequence
  targeting sequence with ATCN PAM
ugucccccaaaaagauaagu

SEQ ID NO: 1285 - RNA, 20 nt, Artificial Sequence
  targeting sequence with ATCN PAM
uccucccacuccugaaccac

SEQ ID NO: 1286 - RNA, 20 nt, Artificial Sequence
  targeting sequence with ATCN PAM
uuucaaacuauucacguuuu

SEQ ID NO: 1287 - RNA, 20 nt, Artificial Sequence
  targeting sequence with ATCN PAM
uuuugugugaauguucaauu

SEQ ID NO: 1288 - RNA, 20 nt, Artificial Sequence
  targeting sequence with ATCN PAM
acucauucagucuaugaggg

SEQ ID NO: 1289 - RNA, 20 nt, Artificial Sequence
  targeting sequence with ATCN PAM
ucaaggcuuccucccucuaa

SEQ ID NO: 1290 - RNA, 20 nt, Artificial Sequence
  targeting sequence with ATCN PAM
cuaaaugccucuuccugagu

SEQ ID NO: 1291 - RNA, 20 nt, Artificial Sequence
  targeting sequence with ATCN PAM
ccucuccuccucuuaucccu

SEQ ID NO: 1292 - RNA, 20 nt, Artificial Sequence
  targeting sequence with ATCN PAM
ccuaccuccacuaucuccuc

SEQ ID NO: 1293 - RNA, 20 nt, Artificial Sequence
  targeting sequence with ATCN PAM
cugcggaggccagauugggg

SEQ ID NO: 1294 - RNA, 20 nt, Artificial Sequence
  targeting sequence with ATCN PAM
ggccuccgcagggaucaccu

SEQ ID NO: 1295 - RNA, 20 nt, Artificial Sequence
  targeting sequence with ATCN PAM
ucuuauacucagcugacacu

SEQ ID NO: 1296 - RNA, 20 nt, Artificial Sequence
  targeting sequence with ATCN PAM
uuuuccccuccugccuuccu

SEQ ID NO: 1297 - RNA, 20 nt, Artificial Sequence
  targeting sequence with ATCN PAM
ggguaagucagaagccucuu

SEQ ID NO: 1298 - RNA, 20 nt, Artificial Sequence
  targeting sequence with ATCN PAM
cucaccaauuaccccuccca

SEQ ID NO: 1299 - RNA, 20 nt, Artificial Sequence
  targeting sequence with ATCN PAM
uccacugcacucuuaugagg

SEQ ID NO: 1300 - RNA, 20 nt, Artificial Sequence
  targeting sequence with ATCN PAM
cauauccuccacugcacucu

SEQ ID NO: 1301 - RNA, 20 nt, Artificial Sequence
  targeting sequence with ATCN PAM
gucgcagagcccagggugcu

SEQ ID NO: 1302 - RNA, 20 nt, Artificial Sequence
  targeting sequence with ATCN PAM
augucccucugugcacaggc

SEQ ID NO: 1303 - RNA, 20 nt, Artificial Sequence
  targeting sequence with ATCN PAM
uucucugggugcacgguaac

SEQ ID NO: 1304 - RNA, 20 nt, Artificial Sequence
  targeting sequence with ATCN PAM
auucuugcuccaggggaggc

SEQ ID NO: 1305 - RNA, 20 nt, Artificial Sequence
  targeting sequence with ATCN PAM
aaggccuccccuggagcaag

SEQ ID NO: 1306 - RNA, 20 nt, Artificial Sequence
  targeting sequence with ATCN PAM
cagcacagaguaggagcuca

SEQ ID NO: 1307 - RNA, 20 nt, Artificial Sequence
  targeting sequence with ATCN PAM
agcccgccaucgcagcacag

SEQ ID NO: 1308 - RNA, 20 nt, Artificial Sequence
  targeting sequence with ATCN PAM
ccaucgagcccgccaucgca

SEQ ID NO: 1309 - RNA, 20 nt, Artificial Sequence
  targeting sequence with ATCN PAM
acuuuggacuccagcaccua

SEQ ID NO: 1310 - RNA, 20 nt, Artificial Sequence
  targeting sequence with ATCN PAM
aggugcuggaguccaaaguu

SEQ ID NO: 1311 - RNA, 20 nt, Artificial Sequence
  targeting sequence with ATCN PAM
gcugugcaucugcaagggag

SEQ ID NO: 1312 - RNA, 20 nt, Artificial Sequence
  targeting sequence with ATCN PAM
gcaagggaggaucauaaauu

SEQ ID NO: 1313 - RNA, 20 nt, Artificial Sequence
  targeting sequence with ATCN PAM
ucccuugcagaugcacagca

SEQ ID NO: 1314 - RNA, 20 nt, Artificial Sequence
  targeting sequence with ATCN PAM
uaaauucgccuuuguuucuu

SEQ ID NO: 1315 - RNA, 20 nt, Artificial Sequence
  targeting sequence with ATCN PAM
acagcccuuccagaaagagc

SEQ ID NO: 1316 - RNA, 20 nt, Artificial Sequence
  targeting sequence with ATCN PAM
gaggccaggagcucucuuuc

SEQ ID NO: 1317 - RNA, 20 nt, Artificial Sequence
  targeting sequence with ATCN PAM
uccugccugguacacaauag

SEQ ID NO: 1318 - RNA, 20 nt, Artificial Sequence
  targeting sequence with ATCN PAM
aguaaacaccuauuguguac

SEQ ID NO: 1319 - RNA, 20 nt, Artificial Sequence
  targeting sequence with ATCN PAM
acuggacaagcauccaguaa

SEQ ID NO: 1320 - RNA, 20 nt, Artificial Sequence
  targeting sequence with ATCN PAM
uugcaaauugaaucuucugg

SEQ ID NO: 1321 - RNA, 20 nt, Artificial Sequence
  targeting sequence with ATCN PAM
ucuggaaagcugagcuugug

SEQ ID NO: 1322 - RNA, 20 nt, Artificial Sequence
  targeting sequence with ATCN PAM
uuguaguauaaaucccuuga

SEQ ID NO: 1323 - RNA, 20 nt, Artificial Sequence
  targeting sequence with ATCN PAM
cuugaaaugcauguaggcug

SEQ ID NO: 1324 - RNA, 20 nt, Artificial Sequence
  targeting sequence with ATCN PAM
aaagcaagcaaucucuucaa

SEQ ID NO: 1325 - RNA, 20 nt, Artificial Sequence
  targeting sequence with ATCN PAM
cuucaaggagcagcuaguug

SEQ ID NO: 1326 - RNA, 20 nt, Artificial Sequence
  targeting sequence with ATCN PAM
uacuguggacuccucgcugc

SEQ ID NO: 1327 - RNA, 20 nt, Artificial Sequence
  targeting sequence with ATCN PAM
auccuacuguggacuccucg

SEQ ID NO: 1328 - RNA, 20 nt, Artificial Sequence
  targeting sequence with ATCN PAM
cacgcagggugagaggcggg

SEQ ID NO: 1329 - RNA, 20 nt, Artificial Sequence
  targeting sequence with ATCN PAM
uaacugggcuggaaggcagg

SEQ ID NO: 1330 - RNA, 20 nt, Artificial Sequence
  targeting sequence with ATCN PAM
gacgcuguuuggggagggcg

SEQ ID NO: 1331 - RNA, 20 nt, Artificial Sequence
  targeting sequence with ATCN PAM
gguuucggccucgcccuccc

SEQ ID NO: 1332 - RNA, 20 nt, Artificial Sequence
  targeting sequence with ATCN PAM
uccaguccggggguuccguu

SEQ ID NO: 1333 - RNA, 20 nt, Artificial Sequence
  targeting sequence with ATCN PAM
gauaggaucguccgaugggg

SEQ ID NO: 1334 - RNA, 20 nt, Artificial Sequence
  targeting sequence with ATCN PAM
gauuaaacauuaacggaacc

SEQ ID NO: 1335 - RNA, 20 nt, Artificial Sequence
  targeting sequence with ATCN PAM
uaucugauuaaacauuaacg

SEQ ID NO: 1336 - RNA, 20 nt, Artificial Sequence
  targeting sequence with ATCN PAM
uccgauggggcucugguggc

SEQ ID NO: 1337 - RNA, 20 nt, Artificial Sequence
  targeting sequence with ATCN PAM
gacgauccuaucugauuaaa

SEQ ID NO: 1338 - RNA, 20 nt, Artificial Sequence
  targeting sequence with ATCN PAM
cgccaccagagccccaucgg

SEQ ID NO: 1339 - RNA, 20 nt, Artificial Sequence
  targeting sequence with ATCN PAM
gcgcgccccaggcgucaagc

SEQ ID NO: 1340 - RNA, 20 nt, Artificial Sequence
  targeting sequence with ATCN PAM
uggcugggagcugggagccg

SEQ ID NO: 1341 - RNA, 20 nt, Artificial Sequence
  targeting sequence with ATCN PAM
cuacacccgcaccuuggcgc

SEQ ID NO: 1342 - RNA, 20 nt, Artificial Sequence
  targeting sequence with ATCN PAM
ugccaagcgaagagcccucg

SEQ ID NO: 1343 - RNA, 20 nt, Artificial Sequence
  targeting sequence with ATCN PAM
uggggacugcaggcaaggcg

SEQ ID NO: 1344 - RNA, 20 nt, Artificial Sequence
  targeting sequence with ATCN PAM
uggcagugcucugcucgccc

SEQ ID NO: 1345 - RNA, 20 nt, Artificial Sequence
  targeting sequence with ATCN PAM
ugcccagauuucccaguuuc

SEQ ID NO: 1346 - RNA, 20 nt, Artificial Sequence
  targeting sequence with ATCN PAM
gggcaggauauccuggcagu

SEQ ID NO: 1347 - RNA, 20 nt, Artificial Sequence
  targeting sequence with ATCN PAM
gaacccacuauaauggcaag

SEQ ID NO: 1348 - RNA, 20 nt, Artificial Sequence
  targeting sequence with ATCN PAM
gccguccuucccaccccgcc

SEQ ID NO: 1349 - RNA, 20 nt, Artificial Sequence
  targeting sequence with ATCN PAM
guuucagccgaagaaaagaa

SEQ ID NO: 1350 - RNA, 20 nt, Artificial Sequence
  targeting sequence with ATCN PAM
gacuccaagcugggggacac

SEQ ID NO: 1351 - RNA, 20 nt, Artificial Sequence
  targeting sequence with ATCN PAM
uggcuuccucucacuagcug

SEQ ID NO: 1352 - RNA, 20 nt, Artificial Sequence
  targeting sequence with ATCN PAM
uugagccuccauugccuaau

SEQ ID NO: 1353 - RNA, 20 nt, Artificial Sequence
  targeting sequence with ATCN PAM
uuaaaagggaggugacaauc

SEQ ID NO: 1354 - RNA, 20 nt, Artificial Sequence
  targeting sequence with ATCN PAM
ucccuacggcucaguggcag

SEQ ID NO: 1355 - RNA, 20 nt, Artificial Sequence
  targeting sequence with ATCN PAM
gcugccacugagccguaggg

SEQ ID NO: 1356 - RNA, 20 nt, Artificial Sequence
  targeting sequence with ATCN PAM
ccccaucugcugccacugag

SEQ ID NO: 1357 - RNA, 20 nt, Artificial Sequence
  targeting sequence with ATCN PAM
ccccggggcuugcauuguaa

SEQ ID NO: 1358 - RNA, 20 nt, Artificial Sequence
  targeting sequence with ATCN PAM
cuugcaguuuugucccuguc

SEQ ID NO: 1359 - RNA, 20 nt, Artificial Sequence
  targeting sequence with ATCN PAM
ugccacccagcacacucaga

SEQ ID NO: 1360 - RNA, 20 nt, Artificial Sequence
  targeting sequence with ATCN PAM
cucgagaaagucaaaggcuc

SEQ ID NO: 1361 - RNA, 20 nt, Artificial Sequence
  targeting sequence with ATCN PAM
uggccacaaccccacaacau

SEQ ID NO: 1362 - RNA, 20 nt, Artificial Sequence
  targeting sequence with ATCN PAM
ugagaggugaguaagcagag

SEQ ID NO: 1363 - RNA, 20 nt, Artificial Sequence
  targeting sequence with ATCN PAM
ucaagggcuugguucaggug

SEQ ID NO: 1364 - RNA, 20 nt, Artificial Sequence
  targeting sequence with ATCN PAM
aauuuagaaugaaaauauuu

SEQ ID NO: 1365 - RNA, 20 nt, Artificial Sequence
  targeting sequence with ATCN PAM
uuuucuuuuagucaugagaa

SEQ ID NO: 1366 - RNA, 20 nt, Artificial Sequence
  targeting sequence with ATCN PAM
gaaaaugccuuccgcuaaau

SEQ ID NO: 1367 - RNA, 20 nt, Artificial Sequence
  targeting sequence with ATCN PAM
cugaacuccuacuaaugcuu

SEQ ID NO: 1368 - RNA, 20 nt, Artificial Sequence
  targeting sequence with ATCN PAM
ucgcugaacuccuacuaaug

SEQ ID NO: 1369 - RNA, 20 nt, Artificial Sequence
  targeting sequence with ATCN PAM
uagaauaaaauucucaugac

SEQ ID NO: 1370 - RNA, 20 nt, Artificial Sequence
  targeting sequence with ATCN PAM
uuguucaugguaccuccuaa

SEQ ID NO: 1371 - RNA, 20 nt, Artificial Sequence
  targeting sequence with ATCN PAM
uccaccucugguuuucccag

SEQ ID NO: 1372 - RNA, 20 nt, Artificial Sequence
  targeting sequence with ATCN PAM
caaaaaaaaaagaaaaagaa

SEQ ID NO: 1373 - RNA, 20 nt, Artificial Sequence
  targeting sequence with ATCN PAM
gucucccggguucaaguggu

SEQ ID NO: 1374 - RNA, 20 nt, Artificial Sequence
  targeting sequence with ATCN PAM
cagcuucuugggaggcugag

SEQ ID NO: 1375 - RNA, 20 nt, Artificial Sequence
  targeting sequence with ATCN PAM
acugaggaggucaggaguuu

SEQ ID NO: 1376 - RNA, 20 nt, Artificial Sequence
  targeting sequence with ATCN PAM
gaggaggugauccucccgcc

SEQ ID NO: 1377 - RNA, 20 nt, Artificial Sequence
  targeting sequence with ATCN PAM
ccuccucggauccacugagg

SEQ ID NO: 1378 - RNA, 20 nt, Artificial Sequence
  targeting sequence with ATCN PAM
ucccgccucagccucccaaa

SEQ ID NO: 1379 - RNA, 20 nt, Artificial Sequence
  targeting sequence with ATCN PAM
accgucugaaauguaaaaug

SEQ ID NO: 1380 - RNA, 20 nt, Artificial Sequence
  targeting sequence with ATCN PAM
caaaaaaaacuuuugguuuu

SEQ ID NO: 1381 - RNA, 20 nt, Artificial Sequence
  targeting sequence with ATCN PAM
aauaaaucacaaaaaaaacu

SEQ ID NO: 1382 - RNA, 20 nt, Artificial Sequence
  targeting sequence with ATCN PAM
caugucaguucacgucaggu

SEQ ID NO: 1383 - RNA, 20 nt, Artificial Sequence
  targeting sequence with ATCN PAM
augcagcaaaauauaugaau

SEQ ID NO: 1384 - RNA, 20 nt, Artificial Sequence
  targeting sequence with ATCN PAM
ggagcugcauacuguaaucu

SEQ ID NO: 1385 - RNA, 20 nt, Artificial Sequence
  targeting sequence with ATCN PAM
gagucugcuuggaagaaucu

SEQ ID NO: 1386 - RNA, 20 nt, Artificial Sequence
  targeting sequence with ATCN PAM
aaacaaguucugagguucaa

SEQ ID NO: 1387 - RNA, 20 nt, Artificial Sequence
  targeting sequence with ATCN PAM
uggacuccagucagaguaga

SEQ ID NO: 1388 - RNA, 20 nt, Artificial Sequence
  targeting sequence with ATCN PAM
cuguauauaugcaucuugga

SEQ ID NO: 1389 - RNA, 20 nt, Artificial Sequence
  targeting sequence with ATCN PAM
cccauaucucuguauauaug

SEQ ID NO: 1390 - RNA, 20 nt, Artificial Sequence
  targeting sequence with ATCN PAM
aguccaaacuccaugcuccu

SEQ ID NO: 1391 - RNA, 20 nt, Artificial Sequence
  targeting sequence with ATCN PAM
ccauagauaguggcugcuau

SEQ ID NO: 1392 - RNA, 20 nt, Artificial Sequence
  targeting sequence with ATCN PAM
auggugauuuguuugguuuu

SEQ ID NO: 1393 - RNA, 20 nt, Artificial Sequence
  targeting sequence with ATCN PAM
cauguggaaauuugguccuc

SEQ ID NO: 1394 - RNA, 20 nt, Artificial Sequence
  targeting sequence with ATCN PAM
caaggacggcaccaagccuu

SEQ ID NO: 1395 - RNA, 20 nt, Artificial Sequence
  targeting sequence with ATCN PAM
uagcgggagaacuuacucau

SEQ ID NO: 1396 - RNA, 20 nt, Artificial Sequence
  targeting sequence with ATCN PAM
gccuucaagggaaaucauag

SEQ ID NO: 1397 - RNA, 20 nt, Artificial Sequence
  targeting sequence with ATCN PAM
cauggcaagagaagaagcaa

SEQ ID NO: 1398 - RNA, 20 nt, Artificial Sequence
  targeting sequence with ATCN PAM
aucacauggcaagagaagaa

SEQ ID NO: 1399 - RNA, 20 nt, Artificial Sequence
  targeting sequence with ATCN PAM
cugcacauguaggcuccccu

SEQ ID NO: 1400 - RNA, 20 nt, Artificial Sequence
  targeting sequence with ATCN PAM
gugaaagcagcuuaaggccc

SEQ ID NO: 1401 - RNA, 20 nt, Artificial Sequence
  targeting sequence with ATCN PAM
gcuucuggugagggccuuaa

SEQ ID NO: 1402 - RNA, 20 nt, Artificial Sequence
  targeting sequence with ATCN PAM
ugagcugaauaaaucccuuu

SEQ ID NO: 1403 - RNA, 20 nt, Artificial Sequence
  targeting sequence with ATCN PAM
cuuuuccuuguaaauuacuc

SEQ ID NO: 1404 - RNA, 20 nt, Artificial Sequence
  targeting sequence with ATCN PAM
cuucugccugcauuuguaga

SEQ ID NO: 1405 - RNA, 20 nt, Artificial Sequence
  targeting sequence with ATCN PAM
ggaugggagauuuauauaac

SEQ ID NO: 1406 - RNA, 20 nt, Artificial Sequence
  targeting sequence with ATCN PAM
agaugcucuacaaaugcagg

SEQ ID NO: 1407 - RNA, 20 nt, Artificial Sequence
  targeting sequence with ATCN PAM
cccauccagaugcucuacaa

SEQ ID NO: 1408 - RNA, 20 nt, Artificial Sequence
  targeting sequence with ATCN PAM
gaggcuccgagagguugagu

SEQ ID NO: 1409 - RNA, 20 nt, Artificial Sequence
  targeting sequence with ATCN PAM
ugggcuuuggagccaggaaa

SEQ ID NO: 1410 - RNA, 20 nt, Artificial Sequence
  targeting sequence with ATCN PAM
ucuacuauacucuguugugu

SEQ ID NO: 1411 - RNA, 20 nt, Artificial Sequence
  targeting sequence with ATCN PAM
acuauacucuguugugucuc

SEQ ID NO: 1412 - RNA, 20 nt, Artificial Sequence
  targeting sequence with ATCN PAM
caccccuacuuacaaauuac

SEQ ID NO: 1413 - RNA, 20 nt, Artificial Sequence
  targeting sequence with ATCN PAM
uguuccuccuugcauggggc

SEQ ID NO: 1414 - RNA, 20 nt, Artificial Sequence
  targeting sequence with ATCN PAM
uggccccaugcaaggaggaa

SEQ ID NO: 1415 - RNA, 20 nt, Artificial Sequence
  targeting sequence with ATCN PAM
guggagguugccuggcaccu

SEQ ID NO: 1416 - RNA, 20 nt, Artificial Sequence
  targeting sequence with ATCN PAM
ccggcgggcagccugggccu

SEQ ID NO: 1417 - RNA, 20 nt, Artificial Sequence
  targeting sequence with ATCN PAM
uggugagguauccccggcgg

SEQ ID NO: 1418 - RNA, 20 nt, Artificial Sequence
  targeting sequence with ATCN PAM
ugcaugucuuccauggccuu

SEQ ID NO: 1419 - RNA, 20 nt, Artificial Sequence
  targeting sequence with ATCN PAM
ucaccaggaagccaggaaga

SEQ ID NO: 1420 - RNA, 20 nt, Artificial Sequence
  targeting sequence with ATCN PAM
ggaagugccauucccaaaaa

SEQ ID NO: 1421 - RNA, 20 nt, Artificial Sequence
  targeting sequence with ATCN PAM
gaaggggacagcaaguaugu

SEQ ID NO: 1422 - RNA, 20 nt, Artificial Sequence
  targeting sequence with ATCN PAM
gguaccaagcacaguaacua

SEQ ID NO: 1423 - RNA, 20 nt, Artificial Sequence
  targeting sequence with ATCN PAM
ucauuugaaagacgaggaga

SEQ ID NO: 1424 - RNA, 20 nt, Artificial Sequence
  targeting sequence with ATCN PAM
aggcucuaccccuagcuguc

SEQ ID NO: 1425 - RNA, 20 nt, Artificial Sequence
  targeting sequence with ATCN PAM
aacccauuggucugccugcc

SEQ ID NO: 1426 - RNA, 20 nt, Artificial Sequence
  targeting sequence with ATCN PAM
gcugccuacggaaaccugua

SEQ ID NO: 1427 - RNA, 20 nt, Artificial Sequence
  targeting sequence with ATCN PAM
cagggccuugucccuacagg

SEQ ID NO: 1428 - RNA, 20 nt, Artificial Sequence
  targeting sequence with ATCN PAM
agagugaagucccuucuuua

SEQ ID NO: 1429 - RNA, 20 nt, Artificial Sequence
  targeting sequence with ATCN PAM
aggagggaggagggccaccc

SEQ ID NO: 1430 - RNA, 20 nt, Artificial Sequence
  targeting sequence with ATCN PAM
ucgguggaggggcagaaagg

SEQ ID NO: 1431 - RNA, 20 nt, Artificial Sequence
  targeting sequence with ATCN PAM
uaaaaaaacguuuuuauuug

SEQ ID NO: 1432 - RNA, 20 nt, Artificial Sequence
  targeting sequence with ATCN PAM
aguuagaggccaggaaacga

SEQ ID NO: 1433 - RNA, 20 nt, Artificial Sequence
  targeting sequence with ATCN PAM
gugugaaaaugacacacgcu

SEQ ID NO: 1434 - RNA, 20 nt, Artificial Sequence
  targeting sequence with ATCN PAM
gcucagcauaccguggcuga

SEQ ID NO: 1435 - RNA, 20 nt, Artificial Sequence
  targeting sequence with ATCN PAM
cugucauggcgccacaggcc

SEQ ID NO: 1436 - RNA, 20 nt, Artificial Sequence
  targeting sequence with ATCN PAM
gucugcucaacacacguuua

SEQ ID NO: 1437 - RNA, 20 nt, Artificial Sequence
  targeting sequence with ATCN PAM
ucgccucugcagcacacagu

SEQ ID NO: 1438 - RNA, 20 nt, Artificial Sequence
  targeting sequence with ATCN PAM
ggugcuauacggguaccuuc

SEQ ID NO: 1439 - RNA, 20 nt, Artificial Sequence
  targeting sequence with ATCN PAM
agagcuggacuucaaacugg

SEQ ID NO: 1440 - RNA, 20 nt, Artificial Sequence
  targeting sequence with ATCN PAM
uaccagccuggguucgaguc

SEQ ID NO: 1441 - RNA, 20 nt, Artificial Sequence
  targeting sequence with ATCN PAM
cuucaccucucugagccuca

SEQ ID NO: 1442 - RNA, 20 nt, Artificial Sequence
  targeting sequence with ATCN PAM
guaaaccaguuauaauaauu

SEQ ID NO: 1443 - RNA, 20 nt, Artificial Sequence
  targeting sequence with ATCN PAM
gcugaaugcuucacgaccuc

SEQ ID NO: 1444 - RNA, 20 nt, Artificial Sequence
  targeting sequence with ATCN PAM
ccagaggcuucuuaaccugc

SEQ ID NO: 1445 - RNA, 20 nt, Artificial Sequence
  targeting sequence with ATCN PAM
agggacuaguuguggcagga

SEQ ID NO: 1446 - RNA, 20 nt, Artificial Sequence
  targeting sequence with ATCN PAM
cccgaggguucaccgcugcc

SEQ ID NO: 1447 - RNA, 20 nt, Artificial Sequence
  targeting sequence with ATCN PAM
gccccacucccucccuaccu

SEQ ID NO: 1448 - RNA, 20 nt, Artificial Sequence
  targeting sequence with ATCN PAM
gcaccucugccucccggguu

SEQ ID NO: 1449 - RNA, 20 nt, Artificial Sequence
  targeting sequence with ATCN PAM
cuugaacccgggaggcagag

SEQ ID NO: 1450 - RNA, 20 nt, Artificial Sequence
  targeting sequence with ATCN PAM
cuauuaaaaauacaaaaauu

SEQ ID NO: 1451 - RNA, 20 nt, Artificial Sequence
  targeting sequence with ATCN PAM
ccugaggucgagaguucgag

SEQ ID NO: 1452 - RNA, 20 nt, Artificial Sequence
  targeting sequence with ATCN PAM
cccaccucggccucccaaag

SEQ ID NO: 1453 - RNA, 20 nt, Artificial Sequence
  targeting sequence with ATCN PAM
cagcacuuugggaggccgag

SEQ ID NO: 1454 - RNA, 20 nt, Artificial Sequence
  targeting sequence with ATCN PAM
gcagcugggagcggugacuc

SEQ ID NO: 1455 - RNA, 20 nt, Artificial Sequence
  targeting sequence with ATCN PAM
ugacauaacagcacuggcaa

SEQ ID NO: 1456 - RNA, 20 nt, Artificial Sequence
  targeting sequence with ATCN PAM
ugcccagagccuuggcacag

SEQ ID NO: 1457 - RNA, 20 nt, Artificial Sequence
  targeting sequence with ATCN PAM
ugucugggagccaggcugug

SEQ ID NO: 1458 - RNA, 20 nt, Artificial Sequence
  targeting sequence with ATCN PAM
uuccuaaaaggaauccucua

SEQ ID NO: 1459 - RNA, 20 nt, Artificial Sequence
  targeting sequence with ATCN PAM
ucuaugccagaccguguugc

SEQ ID NO: 1460 - RNA, 20 nt, Artificial Sequence
  targeting sequence with ATCN PAM
cugcaacacggucuggcaua

SEQ ID NO: 1461 - RNA, 20 nt, Artificial Sequence
  targeting sequence with ATCN PAM
ggcugggagcccagcacucc

SEQ ID NO: 1462 - RNA, 20 nt, Artificial Sequence
  targeting sequence with ATCN PAM
aggagcgagaaaacucaggc

SEQ ID NO: 1463 - RNA, 20 nt, Artificial Sequence
  targeting sequence with ATCN PAM
cagcccagcagccucccacc

SEQ ID NO: 1464 - RNA, 20 nt, Artificial Sequence
  targeting sequence with ATCN PAM
aaccuguccccacaucccag

SEQ ID NO: 1465 - RNA, 20 nt, Artificial Sequence
  targeting sequence with ATCN PAM
gguaaggccaggcuguggcu

SEQ ID NO: 1466 - RNA, 20 nt, Artificial Sequence
  targeting sequence with ATCN PAM
aggaggacuccucugucuuu

SEQ ID NO: 1467 - RNA, 20 nt, Artificial Sequence
  targeting sequence with ATCN PAM
cguggaaccuggagcggauu

SEQ ID NO: 1468 - RNA, 20 nt, Artificial Sequence
  targeting sequence with ATCN PAM
gcuccagguuccacgggaug

SEQ ID NO: 1469 - RNA, 20 nt, Artificial Sequence
  targeting sequence with ATCN PAM
gcccgguaccguggaggggu

SEQ ID NO: 1470 - RNA, 20 nt, Artificial Sequence
  targeting sequence with ATCN PAM
gugcccugccccaccccauc

SEQ ID NO: 1471 - RNA, 20 nt, Artificial Sequence
  targeting sequence with ATCN PAM
gagcugaauccauuugcucu

SEQ ID NO: 1472 - RNA, 20 nt, Artificial Sequence
  targeting sequence with ATCN PAM
auuugcucugcccuggccug

SEQ ID NO: 1473 - RNA, 20 nt, Artificial Sequence
  targeting sequence with ATCN PAM
ccauccccugcagcccccac

SEQ ID NO: 1474 - RNA, 20 nt, Artificial Sequence
  targeting sequence with ATCN PAM
ccugcagcccccacugccug

SEQ ID NO: 1475 - RNA, 20 nt, Artificial Sequence
  targeting sequence with ATCN PAM
uuuaaggcaagacuuuugca

SEQ ID NO: 1476 - RNA, 20 nt, Artificial Sequence
  targeting sequence with ATCN PAM
ucuuuuccuucuuuucucuu

SEQ ID NO: 1477 - RNA, 20 nt, Artificial Sequence
  targeting sequence with ATCN PAM
gauggugacucuaccuaggg

SEQ ID NO: 1478 - RNA, 20 nt, Artificial Sequence
  targeting sequence with ATCN PAM
gaugaacccuccuuccaagg

SEQ ID NO: 1479 - RNA, 20 nt, Artificial Sequence
  targeting sequence with ATCN PAM
gguccagucugcagggcacu

SEQ ID NO: 1480 - RNA, 20 nt, Artificial Sequence
  targeting sequence with ATCN PAM
uuuaaugggauagacacaac

SEQ ID NO: 1481 - RNA, 20 nt, Artificial Sequence
  targeting sequence with ATCN PAM
cauuaaaggaucugguccag

SEQ ID NO: 1482 - RNA, 20 nt, Artificial Sequence
  targeting sequence with ATCN PAM
cagacaggguugugucuauc

SEQ ID NO: 1483 - RNA, 20 nt, Artificial Sequence
  targeting sequence with ATCN PAM
agagucuuccccgacugaau

SEQ ID NO: 1484 - RNA, 20 nt, Artificial Sequence
  targeting sequence with ATCN PAM
cugcgcugagcuccagaccu

SEQ ID NO: 1485 - RNA, 20 nt, Artificial Sequence
  targeting sequence with ATCN PAM
ucucugcgcugagcuccaga

SEQ ID NO: 1486 - RNA, 20 nt, Artificial Sequence
  targeting sequence with ATCN PAM
cacgagaaccgguaaggggu

SEQ ID NO: 1487 - RNA, 20 nt, Artificial Sequence
  targeting sequence with ATCN PAM
ugggaagccacuuucuucua

SEQ ID NO: 1488 - RNA, 20 nt, Artificial Sequence
  targeting sequence with ATCN PAM
uucaacucauuggagucuca

SEQ ID NO: 1489 - RNA, 20 nt, Artificial Sequence
  targeting sequence with ATCN PAM
gcacauccuucaacucauug

SEQ ID NO: 1490 - RNA, 20 nt, Artificial Sequence
  targeting sequence with ATCN PAM
guugcaauggcagcaacuca

SEQ ID NO: 1491 - RNA, 20 nt, Artificial Sequence
  targeting sequence with ATCN PAM
gagcuggugggcugggugug

SEQ ID NO: 1492 - RNA, 20 nt, Artificial Sequence
  targeting sequence with ATCN PAM
ucuggcaaggguggcagcag

SEQ ID NO: 1493 - RNA, 20 nt, Artificial Sequence
  targeting sequence with ATCN PAM
gugccucagggaccucccgg

SEQ ID NO: 1494 - RNA, 20 nt, Artificial Sequence
  targeting sequence with ATCN PAM
gagaccaagagggacacugg

SEQ ID NO: 1495 - RNA, 20 nt, Artificial Sequence
  targeting sequence with ATCN PAM
ucugccagugucccucuugg

SEQ ID NO: 1496 - RNA, 20 nt, Artificial Sequence
  targeting sequence with ATCN PAM
cagagaccccaguccaggca

SEQ ID NO: 1497 - RNA, 20 nt, Artificial Sequence
  targeting sequence with ATCN PAM
ucucagucccugccuggacu

SEQ ID NO: 1498 - RNA, 20 nt, Artificial Sequence
  targeting sequence with ATCN PAM
ugcccccuaaguuaguuucc

SEQ ID NO: 1499 - RNA, 20 nt, Artificial Sequence
  targeting sequence with ATCN PAM
acuuguuccaaccgaggggg

SEQ ID NO: 1500 - RNA, 20 nt, Artificial Sequence
  targeting sequence with ATCN PAM
gugucggcaggaccacuuuc

SEQ ID NO: 1501 - RNA, 20 nt, Artificial Sequence
  targeting sequence with ATCN PAM
cagccucugucuucacacag

SEQ ID NO: 1502 - RNA, 20 nt, Artificial Sequence
  targeting sequence with ATCN PAM
aaugacaaguguccuuauga

SEQ ID NO: 1503 - RNA, 20 nt, Artificial Sequence
  targeting sequence with ATCN PAM
agugggcccuaaauccaaug

SEQ ID NO: 1504 - RNA, 20 nt, Artificial Sequence
  targeting sequence with ATCN PAM
uccaggaugaucucaugugg

SEQ ID NO: 1505 - RNA, 20 nt, Artificial Sequence
  targeting sequence with ATCN PAM
uggaggauccagugggcccu

SEQ ID NO: 1506 - RNA, 20 nt, Artificial Sequence
  targeting sequence with ATCN PAM
uccuggaggauccagugggc

SEQ ID NO: 1507 - RNA, 20 nt, Artificial Sequence
  targeting sequence with ATCN PAM
cauguggggaaccuuaacca

SEQ ID NO: 1508 - RNA, 20 nt, Artificial Sequence
  targeting sequence with ATCN PAM
gcaaggacccuuuuuccaaa

SEQ ID NO: 1509 - RNA, 20 nt, Artificial Sequence
  targeting sequence with ATCN PAM
uaacccccacaaccuguggc

SEQ ID NO: 1510 - RNA, 20 nt, Artificial Sequence
  targeting sequence with ATCN PAM
cuuuggcagccacuguuccc

SEQ ID NO: 1511 - RNA, 20 nt, Artificial Sequence
  targeting sequence with ATCN PAM
uauggggaagaaagggcccc

SEQ ID NO: 1512 - RNA, 20 nt, Artificial Sequence
  targeting sequence with ATCN PAM
augggcauccuauggggaag

SEQ ID NO: 1513 - RNA, 20 nt, Artificial Sequence
  targeting sequence with ATCN PAM
agggcuuggcuggaggaagu

SEQ ID NO: 1514 - RNA, 20 nt, Artificial Sequence
  targeting sequence with ATCN PAM
gagagggugagugacguaug

SEQ ID NO: 1515 - RNA, 20 nt, Artificial Sequence
  targeting sequence with ATCN PAM
ucagguuccucugcaaaagg

SEQ ID NO: 1516 - RNA, 20 nt, Artificial Sequence
  targeting sequence with ATCN PAM
uuaccucccuuuugcagagg

SEQ ID NO: 1517 - RNA, 20 nt, Artificial Sequence
  targeting sequence with ATCN PAM
guuauugcuguagcaugcau

SEQ ID NO: 1518 - RNA, 20 nt, Artificial Sequence
  targeting sequence with ATCN PAM
cagcaccucacucaauaccu

SEQ ID NO: 1519 - RNA, 20 nt, Artificial Sequence
  targeting sequence with ATCN PAM
ccagcaccuaauauggugcc

SEQ ID NO: 1520 - RNA, 20 nt, Artificial Sequence
  targeting sequence with ATCN PAM
agaagauuaauccauuccuu

SEQ ID NO: 1521 - RNA, 20 nt, Artificial Sequence
  targeting sequence with ATCN PAM
ucuggauacacuguuggggg

SEQ ID NO: 1522 - RNA, 20 nt, Artificial Sequence
  targeting sequence with ATCN PAM
auuccuuaaacaaaugcuac

SEQ ID NO: 1523 - RNA, 20 nt, Artificial Sequence
  targeting sequence with ATCN PAM
gugucaaguagcauuuguuu

SEQ ID NO: 1524 - RNA, 20 nt, Artificial Sequence
  targeting sequence with ATCN PAM
agaacuaaucugugucaagu

SEQ ID NO: 1525 - RNA, 20 nt, Artificial Sequence
  targeting sequence with ATCN PAM
agcagaaggaucaggaaagg

SEQ ID NO: 1526 - RNA, 20 nt, Artificial Sequence
  targeting sequence with ATCN PAM
uucugcuggauacacaggcu

SEQ ID NO: 1527 - RNA, 20 nt, Artificial Sequence
  targeting sequence with ATCN PAM
ggaaaggauuccuggaggaa

SEQ ID NO: 1528 - RNA, 20 nt, Artificial Sequence
  targeting sequence with ATCN PAM
uuuccugauccuucugcugg

SEQ ID NO: 1529 - RNA, 20 nt, Artificial Sequence
  targeting sequence with ATCN PAM
acguucauuccacugcuugg

SEQ ID NO: 1530 - RNA, 20 nt, Artificial Sequence
  targeting sequence with ATCN PAM
gaccuggaggccacccaggc

SEQ ID NO: 1531 - RNA, 20 nt, Artificial Sequence
  targeting sequence with ATCN PAM
uccaaacccccgggugaggc

SEQ ID NO: 1532 - RNA, 20 nt, Artificial Sequence
  targeting sequence with ATCN PAM
gagcugggccccuuuccagc

SEQ ID NO: 1533 - RNA, 20 nt, Artificial Sequence
  targeting sequence with ATCN PAM
uugggcuuccuuccagugag

SEQ ID NO: 1534 - RNA, 20 nt, Artificial Sequence
  targeting sequence with ATCN PAM
gccgcuggggccacacccca

SEQ ID NO: 1535 - RNA, 20 nt, Artificial Sequence
  targeting sequence with ATCN PAM
cugggccugggguguggccc

SEQ ID NO: 1536 - RNA, 20 nt, Artificial Sequence
  targeting sequence with ATCN PAM
ucuugcagcagaacccaggu

SEQ ID NO: 1537 - RNA, 20 nt, Artificial Sequence
  targeting sequence with ATCN PAM
ugcagcagaacccagguaca

SEQ ID NO: 1538 - RNA, 20 nt, Artificial Sequence
  targeting sequence with ATCN PAM
gcuccaggagcuguaccugg

SEQ ID NO: 1539 - RNA, 20 nt, Artificial Sequence
  targeting sequence with ATCN PAM
agcagaaggccugcugggca

SEQ ID NO: 1540 - RNA, 20 nt, Artificial Sequence
  targeting sequence with ATCN PAM
agaagacagcacagaggcug

SEQ ID NO: 1541 - RNA, 20 nt, Artificial Sequence
  targeting sequence with ATCN PAM
aguugucccgucagccugga

SEQ ID NO: 1542 - RNA, 20 nt, Artificial Sequence
  targeting sequence with ATCN PAM
ccugcagccagcccggggcc

SEQ ID NO: 1543 - RNA, 20 nt, Artificial Sequence
  targeting sequence with ATCN PAM
ggccucugcccaccuugcug

SEQ ID NO: 1544 - RNA, 20 nt, Artificial Sequence
  targeting sequence with ATCN PAM
agugguuccucuaggguggc

SEQ ID NO: 1545 - RNA, 20 nt, Artificial Sequence
  targeting sequence with ATCN PAM
ggagaccaaacagugcucgc

SEQ ID NO: 1546 - RNA, 20 nt, Artificial Sequence
  targeting sequence with ATCN PAM
accaugugcccggugcuaca

SEQ ID NO: 1547 - RNA, 20 nt, Artificial Sequence
  targeting sequence with ATCN PAM
auaggcaucuaccaugugcc

SEQ ID NO: 1548 - RNA, 20 nt, Artificial Sequence
  targeting sequence with ATCN PAM
cacagccugggaggagaggc

SEQ ID NO: 1549 - RNA, 20 nt, Artificial Sequence
  targeting sequence with ATCN PAM
gucccgugggcacuuugguu

SEQ ID NO: 1550 - RNA, 20 nt, Artificial Sequence
  targeting sequence with ATCN PAM
guggagcuuccugccgagac

SEQ ID NO: 1551 - RNA, 20 nt, Artificial Sequence
  targeting sequence with ATCN PAM
ucccacccacccacuaugcu

SEQ ID NO: 1552 - RNA, 20 nt, Artificial Sequence
  targeting sequence with ATCN PAM
cacaugaauuucaggcaagg

SEQ ID NO: 1553 - RNA, 20 nt, Artificial Sequence
  targeting sequence with ATCN PAM
cagagcagccacugaauugc

SEQ ID NO: 1554 - RNA, 20 nt, Artificial Sequence
  targeting sequence with ATCN PAM
gugggggccacuauuuagcc

SEQ ID NO: 1555 - RNA, 20 nt, Artificial Sequence
  targeting sequence with ATCN PAM
acaaagaccuuuucuccaaa

SEQ ID NO: 1556 - RNA, 20 nt, Artificial Sequence
  targeting sequence with ATCN PAM
caagauggcaucaucuggau

SEQ ID NO: 1557 - RNA, 20 nt, Artificial Sequence
  targeting sequence with ATCN PAM
ugagaugcuuaauuacaucu

SEQ ID NO: 1558 - RNA, 20 nt, Artificial Sequence
  targeting sequence with ATCN PAM
ucuggauuaugcggugggcu

SEQ ID NO: 1559 - RNA, 20 nt, Artificial Sequence
  targeting sequence with ATCN PAM
ggauuaugcggugggcugua

SEQ ID NO: 1560 - RNA, 20 nt, Artificial Sequence
  targeting sequence with ATCN PAM
agaugaugccaucuugagau

SEQ ID NO: 1561 - RNA, 20 nt, Artificial Sequence
  targeting sequence with ATCN PAM
caggacuuacagcccaccgc

SEQ ID NO: 1562 - RNA, 20 nt, Artificial Sequence
  targeting sequence with ATCN PAM
cccucugccuuucucucaua

SEQ ID NO: 1563 - RNA, 20 nt, Artificial Sequence
  targeting sequence with ATCN PAM
ccaccucugucuccacgugg

SEQ ID NO: 1564 - RNA, 20 nt, Artificial Sequence
  targeting sequence with ATCN PAM
caggacaggugagcaagugu

SEQ ID NO: 1565 - RNA, 20 nt, Artificial Sequence
  targeting sequence with ATCN PAM
cuacucugcagcauauuugg

SEQ ID NO: 1566 - RNA, 20 nt, Artificial Sequence
  targeting sequence with ATCN PAM
uccaaauaugcugcagagua

SEQ ID NO: 1567 - RNA, 20 nt, Artificial Sequence
  targeting sequence with ATCN PAM
cugcgggggccacagaggug

SEQ ID NO: 1568 - RNA, 20 nt, Artificial Sequence
  targeting sequence with ATCN PAM
gaacagcaccucuguggccc

SEQ ID NO: 1569 - RNA, 20 nt, Artificial Sequence
  targeting sequence with ATCN PAM
gagggcagcccucugggcug

SEQ ID NO: 1570 - RNA, 20 nt, Artificial Sequence
  targeting sequence with ATCN PAM
agcaggcuggaccugccugg

SEQ ID NO: 1571 - RNA, 20 nt, Artificial Sequence
  targeting sequence with ATCN PAM
gugagcucucccuacuuucu

SEQ ID NO: 1572 - RNA, 20 nt, Artificial Sequence
  targeting sequence with ATCN PAM
aaacugauccaguuagggau

SEQ ID NO: 1573 - RNA, 20 nt, Artificial Sequence
  targeting sequence with ATCN PAM
guuuggauucuccaagaagc

SEQ ID NO: 1574 - RNA, 20 nt, Artificial Sequence
  targeting sequence with ATCN PAM
aguuagggaugauaaagugu

SEQ ID NO: 1575 - RNA, 20 nt, Artificial Sequence
  targeting sequence with ATCN PAM
cuaacuggaucaguuuggau

SEQ ID NO: 1576 - RNA, 20 nt, Artificial Sequence
  targeting sequence with ATCN PAM
ucccuaacuggaucaguuug

SEQ ID NO: 1577 - RNA, 20 nt, Artificial Sequence
  targeting sequence with ATCN PAM
uguggaguggagaacgcuug

SEQ ID NO: 1578 - RNA, 20 nt, Artificial Sequence
  targeting sequence with ATCN PAM
uguccgagcugcagcuuccu

SEQ ID NO: 1579 - RNA, 20 nt, Artificial Sequence
  targeting sequence with ATCN PAM
cuguuauucuccuuugaguc

SEQ ID NO: 1580 - RNA, 20 nt, Artificial Sequence
  targeting sequence with ATCN PAM
uguugucuuucuugcagacu

SEQ ID NO: 1581 - RNA, 20 nt, Artificial Sequence
  targeting sequence with ATCN PAM
aaguguaaaauaaagccccu

SEQ ID NO: 1582 - RNA, 20 nt, Artificial Sequence
  targeting sequence with ATCN PAM
aacaauaauaugaauguuca

SEQ ID NO: 1583 - RNA, 20 nt, Artificial Sequence
  targeting sequence with ATCN PAM
auaucuaacaauaauaugaa

SEQ ID NO: 1584 - RNA, 20 nt, Artificial Sequence
  targeting sequence with ATCN PAM
ugcuccuucauaugaauauc

SEQ ID NO: 1585 - RNA, 20 nt, Artificial Sequence
  targeting sequence with ATCN PAM
gcuggcaaugcuacugccaa

SEQ ID NO: 1586 - RNA, 20 nt, Artificial Sequence
  targeting sequence with ATCN PAM
uauucuauaauguauuucau

SEQ ID NO: 1587 - RNA, 20 nt, Artificial Sequence
  targeting sequence with ATCN PAM
ucacacacuacauccuauuc

SEQ ID NO: 1588 - RNA, 20 nt, Artificial Sequence
  targeting sequence with ATCN PAM
caggcacuggugaaagcgcc

SEQ ID NO: 1589 - RNA, 20 nt, Artificial Sequence
  targeting sequence with ATCN PAM
ccuagacaccagcauacaga

SEQ ID NO: 1590 - RNA, 20 nt, Artificial Sequence
  targeting sequence with ATCN PAM
agggcagggucauggucacc

SEQ ID NO: 1591 - RNA, 20 nt, Artificial Sequence
  targeting sequence with ATCN PAM
gacggccgugcuuaccuguc

SEQ ID NO: 1592 - RNA, 20 nt, Artificial Sequence
  targeting sequence with ATCN PAM
ccauccuggagguggguggg

SEQ ID NO: 1593 - RNA, 20 nt, Artificial Sequence
  targeting sequence with ATCN PAM
uggagguggguggggacugc

SEQ ID NO: 1594 - RNA, 20 nt, Artificial Sequence
  targeting sequence with ATCN PAM
guugugggaagggcguucau

SEQ ID NO: 1595 - RNA, 20 nt, Artificial Sequence
  targeting sequence with ATCN PAM
auccagccaccugcugauuu

SEQ ID NO: 1596 - RNA, 20 nt, Artificial Sequence
  targeting sequence with ATCN PAM
agccaccugcugauuuguua

SEQ ID NO: 1597 - RNA, 20 nt, Artificial Sequence
  targeting sequence with ATCN PAM
gcagguggcuggauggauga

SEQ ID NO: 1598 - RNA, 20 nt, Artificial Sequence
  targeting sequence with ATCN PAM
cggccgcugaccaccccugc

SEQ ID NO: 1599 - RNA, 20 nt, Artificial Sequence
  targeting sequence with ATCN PAM
cuuaccuaugagggugccgc

SEQ ID NO: 1600 - RNA, 20 nt, Artificial Sequence
  targeting sequence with ATCN PAM
ggaccuggccugggaggugg

SEQ ID NO: 1601 - RNA, 20 nt, Artificial Sequence
  targeting sequence with ATCN PAM
gcacucguggccacugggaa

SEQ ID NO: 1602 - RNA, 20 nt, Artificial Sequence
  targeting sequence with ATCN PAM
ggugaugucuuuaugucuuu

SEQ ID NO: 1603 - RNA, 20 nt, Artificial Sequence
  targeting sequence with ATCN PAM
ccggauuuuaaaaggggagc

SEQ ID NO: 1604 - RNA, 20 nt, Artificial Sequence
  targeting sequence with ATCN PAM
ucaauguggagggacucgag

SEQ ID NO: 1605 - RNA, 20 nt, Artificial Sequence
  targeting sequence with ATCN PAM
ccucgagucccuccacauug

SEQ ID NO: 1606 - RNA, 20 nt, Artificial Sequence
  targeting sequence with ATCN PAM
aagcaaacuuuuucuaucuu

SEQ ID NO: 1607 - RNA, 20 nt, Artificial Sequence
  targeting sequence with ATCN PAM
ucugcuugcauaccucugag

SEQ ID NO: 1608 - RNA, 20 nt, Artificial Sequence
  targeting sequence with ATCN PAM
gccuggccagugugaccugc

SEQ ID NO: 1609 - RNA, 20 nt, Artificial Sequence
  targeting sequence with ATCN PAM
aaaccuguacucuguaggaa

SEQ ID NO: 1610 - RNA, 20 nt, Artificial Sequence
  targeting sequence with ATCN PAM
auaaccuucugccccaucag

SEQ ID NO: 1611 - RNA, 20 nt, Artificial Sequence
  targeting sequence with ATCN PAM
ggugaccccuugugccuguc

SEQ ID NO: 1612 - RNA, 20 nt, Artificial Sequence
  targeting sequence with ATCN PAM
ccugcuuacagaggaggaaa

SEQ ID NO: 1613 - RNA, 20 nt, Artificial Sequence
  targeting sequence with ATCN PAM
cugugcucagacuggacaca

SEQ ID NO: 1614 - RNA, 20 nt, Artificial Sequence
  targeting sequence with ATCN PAM
cagcacuuugggaggccgag

SEQ ID NO: 1615 - RNA, 20 nt, Artificial Sequence
  targeting sequence with ATCN PAM
gcccaccucggccucccaaa

SEQ ID NO: 1616 - RNA, 20 nt, Artificial Sequence
  targeting sequence with ATCN PAM
ccugaggucaggaguucgag

SEQ ID NO: 1617 - RNA, 20 nt, Artificial Sequence
  targeting sequence with ATCN PAM
cagcuacuugggaggcuaag

SEQ ID NO: 1618 - RNA, 20 nt, Artificial Sequence
  targeting sequence with ATCN PAM
cuugaacccaggagguggag

SEQ ID NO: 1619 - RNA, 20 nt, Artificial Sequence
  targeting sequence with ATCN PAM
cagcucacugcaaccuccac

SEQ ID NO: 1620 - RNA, 20 nt, Artificial Sequence
  targeting sequence with ATCN PAM
ugccacugcaauccagccug

SEQ ID NO: 1621 - RNA, 20 nt, Artificial Sequence
  targeting sequence with ATCN PAM
agccugagugauagagcgag

SEQ ID NO: 1622 - RNA, 20 nt, Artificial Sequence
  targeting sequence with ATCN PAM
cucaggcuggauugcagugg

SEQ ID NO: 1623 - RNA, 20 nt, Artificial Sequence
  targeting sequence with ATCN PAM
cgcucuaucacucaggcugg

SEQ ID NO: 1624 - RNA, 20 nt, Artificial Sequence
  targeting sequence with ATCN PAM
caaaaauaaauaaguaaaua

SEQ ID NO: 1625 - RNA, 20 nt, Artificial Sequence
  targeting sequence with ATCN PAM
cacagccaugcuccuccuag

SEQ ID NO: 1626 - RNA, 20 nt, Artificial Sequence
  targeting sequence with ATCN PAM
uuggccacggcuccuggaga

SEQ ID NO: 1627 - RNA, 20 nt, Artificial Sequence
  targeting sequence with ATCN PAM
uagaggccaggauccagaag

SEQ ID NO: 1628 - RNA, 20 nt, Artificial Sequence
  targeting sequence with ATCN PAM
uggccucuaagaugucucca

SEQ ID NO: 1629 - RNA, 20 nt, Artificial Sequence
  targeting sequence with ATCN PAM
agaaggcucccacaccucau

SEQ ID NO: 1630 - RNA, 20 nt, Artificial Sequence
  targeting sequence with ATCN PAM
gggccagagcugcguuaggc

SEQ ID NO: 1631 - RNA, 20 nt, Artificial Sequence
  targeting sequence with ATCN PAM
uagcacuuugggagggcaag

SEQ ID NO: 1632 - RNA, 20 nt, Artificial Sequence
  targeting sequence with ATCN PAM
ucccgccuugcccucccaaa

SEQ ID NO: 1633 - RNA, 20 nt, Artificial Sequence
  targeting sequence with ATCN PAM
ugaggucaggacaucgagac

SEQ ID NO: 1634 - RNA, 20 nt, Artificial Sequence
  targeting sequence with ATCN PAM
agaccauccuugcuaacacg

SEQ ID NO: 1635 - RNA, 20 nt, Artificial Sequence
  targeting sequence with ATCN PAM
uugcuaacacggugaagccc

SEQ ID NO: 1636 - RNA, 20 nt, Artificial Sequence
  targeting sequence with ATCN PAM
cggcucacugcaagcuccgc

SEQ ID NO: 1637 - RNA, 20 nt, Artificial Sequence
  targeting sequence with ATCN PAM
ugggagcaacugucccuguu

SEQ ID NO: 1638 - RNA, 20 nt, Artificial Sequence
  targeting sequence with ATCN PAM
gagccaggccucagagagug

SEQ ID NO: 1639 - RNA, 20 nt, Artificial Sequence
  targeting sequence with ATCN PAM
ucuuggugccucucuuucau

SEQ ID NO: 1640 - RNA, 20 nt, Artificial Sequence
  targeting sequence with ATCN PAM
cuuuccaugaaagagaggca

SEQ ID NO: 1641 - RNA, 20 nt, Artificial Sequence
  targeting sequence with ATCN PAM
ucacaauaaccuuauuaucc

SEQ ID NO: 1642 - RNA, 20 nt, Artificial Sequence
  targeting sequence with ATCN PAM
ccugaguucguauauucaga

SEQ ID NO: 1643 - RNA, 20 nt, Artificial Sequence
  targeting sequence with ATCN PAM
aacuagccaaccccgggccc

SEQ ID NO: 1644 - RNA, 20 nt, Artificial Sequence
  targeting sequence with ATCN PAM
uccaguuuguauuggucaag

SEQ ID NO: 1645 - RNA, 20 nt, Artificial Sequence
  targeting sequence with ATCN PAM
uacugguucugcuucucugc

SEQ ID NO: 1646 - RNA, 20 nt, Artificial Sequence
  targeting sequence with ATCN PAM
gcagggcaggccaggcaggc

SEQ ID NO: 1647 - RNA, 20 nt, Artificial Sequence
  targeting sequence with ATCN PAM
aauucugcaggaauugccag

SEQ ID NO: 1648 - RNA, 20 nt, Artificial Sequence
  targeting sequence with ATCN PAM
guugaaggccuuaagagaac

SEQ ID NO: 1649 - RNA, 20 nt, Artificial Sequence
  targeting sequence with ATCN PAM
gaagacggaguaaggcaggu

SEQ ID NO: 1650 - RNA, 20 nt, Artificial Sequence
  targeting sequence with ATCN PAM
aaaaaauauuuucgcagcag

SEQ ID NO: 1651 - RNA, 20 nt, Artificial Sequence
  targeting sequence with ATCN PAM
ggccacaaaguugaucccca

SEQ ID NO: 1652 - RNA, 20 nt, Artificial Sequence
  targeting sequence with ATCN PAM
acuuuguggccugauguuug

SEQ ID NO: 1653 - RNA, 20 nt, Artificial Sequence
  targeting sequence with ATCN PAM
ccaaaauuaaccaucacucu

SEQ ID NO: 1654 - RNA, 20 nt, Artificial Sequence
  targeting sequence with ATCN PAM
cucugugccuguaagggagg

SEQ ID NO: 1655 - RNA, 20 nt, Artificial Sequence
  targeting sequence with ATCN PAM
ucccggaaguugccggcagc

SEQ ID NO: 1656 - RNA, 20 nt, Artificial Sequence
  targeting sequence with ATCN PAM
ucgcagagucugaauagcag

SEQ ID NO: 1657 - RNA, 20 nt, Artificial Sequence
  targeting sequence with ATCN PAM
cagagucugaauagcagugg

SEQ ID NO: 1658 - RNA, 20 nt, Artificial Sequence
  targeting sequence with ATCN PAM
ccauccccaggcccugcguc

SEQ ID NO: 1659 - RNA, 20 nt, Artificial Sequence
  targeting sequence with ATCN PAM
ccaggcccugcguccucugc

SEQ ID NO: 1660 - RNA, 20 nt, Artificial Sequence
  targeting sequence with ATCN PAM
acagagugugccgcaugccc

SEQ ID NO: 1661 - RNA, 20 nt, Artificial Sequence
  targeting sequence with ATCN PAM
aggggaaggaaucuuguucc

SEQ ID NO: 1662 - RNA, 20 nt, Artificial Sequence
  targeting sequence with ATCN PAM
uguuccacuucaagucugga

SEQ ID NO: 1663 - RNA, 20 nt, Artificial Sequence
  targeting sequence with ATCN PAM
gcucugcaacccccaccccc

SEQ ID NO: 1664 - RNA, 20 nt, Artificial Sequence
  targeting sequence with ATCN PAM
aggcuucccuggcggccgaa

SEQ ID NO: 1665 - RNA, 20 nt, Artificial Sequence
  targeting sequence with ATCN PAM
agcaaacaaagcccaacaca

SEQ ID NO: 1666 - RNA, 20 nt, Artificial Sequence
  targeting sequence with ATCN PAM
cugccuuguccucucaguuu

SEQ ID NO: 1667 - RNA, 20 nt, Artificial Sequence
  targeting sequence with ATCN PAM
agugguucuaagugccacgg

SEQ ID NO: 1668 - RNA, 20 nt, Artificial Sequence
  targeting sequence with ATCN PAM
cccccacuaggauguaaacu

SEQ ID NO: 1669 - RNA, 20 nt, Artificial Sequence
  targeting sequence with ATCN PAM
uagugggggagauaggaaac

SEQ ID NO: 1670 - RNA, 20 nt, Artificial Sequence
  targeting sequence with ATCN PAM
gacugcccaggcagaacucu

SEQ ID NO: 1671 - RNA, 20 nt, Artificial Sequence
  targeting sequence with ATCN PAM
caguuggggccaccaaugcc

SEQ ID NO: 1672 - RNA, 20 nt, Artificial Sequence
  targeting sequence with ATCN PAM
uuggugccuccagcgacugc

SEQ ID NO: 1673 - RNA, 20 nt, Artificial Sequence
  targeting sequence with ATCN PAM
caggcugcugcccacguggc

SEQ ID NO: 1674 - RNA, 20 nt, Artificial Sequence
  targeting sequence with ATCN PAM
cgguggccgaggcagugggg

SEQ ID NO: 1675 - RNA, 20 nt, Artificial Sequence
  targeting sequence with ATCN PAM
cuggucccccugcacagagc

SEQ ID NO: 1676 - RNA, 20 nt, Artificial Sequence
  targeting sequence with ATCN PAM
ggccuacuucaucucugguc

SEQ ID NO: 1677 - RNA, 20 nt, Artificial Sequence
  targeting sequence with ATCN PAM
gacugaguguccuugaaggc

SEQ ID NO: 1678 - RNA, 20 nt, Artificial Sequence
  targeting sequence with ATCN PAM
uggaggagggacauuugauc

SEQ ID NO: 1679 - RNA, 20 nt, Artificial Sequence
  targeting sequence with ATCN PAM
aaugucccuccuccaagaug

SEQ ID NO: 1680 - RNA, 20 nt, Artificial Sequence
  targeting sequence with ATCN PAM
ggagcuugauggaugaauag

SEQ ID NO: 1681 - RNA, 20 nt, Artificial Sequence
  targeting sequence with ATCN PAM
agcucccgaucaaauguccc

SEQ ID NO: 1682 - RNA, 20 nt, Artificial Sequence
  targeting sequence with ATCN PAM
aucaagcucccgaucaaaug

SEQ ID NO: 1683 - RNA, 20 nt, Artificial Sequence
  targeting sequence with ATCN PAM
gccaggugaacuccuauuca

SEQ ID NO: 1684 - RNA, 20 nt, Artificial Sequence
  targeting sequence with ATCN PAM
ccaucuuucaccauucaccc

SEQ ID NO: 1685 - RNA, 20 nt, Artificial Sequence
  targeting sequence with ATCN PAM
uucaccauucaccccugcac

SEQ ID NO: 1686 - RNA, 20 nt, Artificial Sequence
  targeting sequence with ATCN PAM
uggcugcaaugccuggugca

SEQ ID NO: 1687 - RNA, 20 nt, Artificial Sequence
  targeting sequence with ATCN PAM
gucucugccucaacucggcc

SEQ ID NO: 1688 - RNA, 20 nt, Artificial Sequence
  targeting sequence with ATCN PAM
acuucucugccaaagauguc

SEQ ID NO: 1689 - RNA, 20 nt, Artificial Sequence
  targeting sequence with ATCN PAM
uuggcagagaaguggaucag

SEQ ID NO: 1690 - RNA, 20 nt, Artificial Sequence
  targeting sequence with ATCN PAM
augaggccugguucccugag

SEQ ID NO: 1691 - RNA, 20 nt, Artificial Sequence
  targeting sequence with ATCN PAM
ugcuuaccugccccaugggu

SEQ ID NO: 1692 - RNA, 20 nt, Artificial Sequence
  targeting sequence with ATCN PAM
uccuuacacagacaagggag

SEQ ID NO: 1693 - RNA, 20 nt, Artificial Sequence
  targeting sequence with ATCN PAM
uauuuaagguggcgucaucc

SEQ ID NO: 1694 - RNA, 20 nt, Artificial Sequence
  targeting sequence with ATCN PAM
uuaguucaugguaggagaga

SEQ ID NO: 1695 - RNA, 20 nt, Artificial Sequence
  targeting sequence with ATCN PAM
caggcccuuuuugcagguug

SEQ ID NO: 1696 - RNA, 20 nt, Artificial Sequence
  targeting sequence with ATCN PAM
guguaggccccgagugugcu

SEQ ID NO: 1697 - RNA, 20 nt, Artificial Sequence
  targeting sequence with ATCN PAM
ggggcgcagcgggcgacggc

SEQ ID NO: 1698 - RNA, 20 nt, Artificial Sequence
  targeting sequence with ATCN PAM
uccagacuccagcucuucug

SEQ ID NO: 1699 - RNA, 20 nt, Artificial Sequence
  targeting sequence with ATCN PAM
agcacuguccugcagccucu

SEQ ID NO: 1700 - RNA, 20 nt, Artificial Sequence
  targeting sequence with ATCN PAM
auccagcacuguccugcagc

SEQ ID NO: 1701 - RNA, 20 nt, Artificial Sequence
  targeting sequence with ATCN PAM
cugacccucacgcggcccug

SEQ ID NO: 1702 - RNA, 20 nt, Artificial Sequence
  targeting sequence with ATCN PAM
gcuacucuggacucagccau

SEQ ID NO: 1703 - RNA, 20 nt, Artificial Sequence
  targeting sequence with ATCN PAM
cuaggccccucucacucagg

SEQ ID NO: 1704 - RNA, 20 nt, Artificial Sequence
  targeting sequence with ATCN PAM
caaaccagcaaaaaagugga

SEQ ID NO: 1705 - RNA, 20 nt, Artificial Sequence
  targeting sequence with ATCN PAM
auuccacuuuuuugcugguu

SEQ ID NO: 1706 - RNA, 20 nt, Artificial Sequence
  targeting sequence with ATCN PAM
acaucaauuccacuuuuuug

SEQ ID NO: 1707 - RNA, 20 nt, Artificial Sequence
  targeting sequence with ATCN PAM
uguagcaucaacaucaauuc

SEQ ID NO: 1708 - RNA, 20 nt, Artificial Sequence
  targeting sequence with ATCN PAM
gugcacuauccuguagcauc

SEQ ID NO: 1709 - RNA, 20 nt, Artificial Sequence
  targeting sequence with ATCN PAM
gguugcagcauuuuggugga

SEQ ID NO: 1710 - RNA, 20 nt, Artificial Sequence
  targeting sequence with ATCN PAM
ccucaagccagaaaugccug

SEQ ID NO: 1711 - RNA, 20 nt, Artificial Sequence
  targeting sequence with ATCN PAM
agccagcuccacuccaccca

SEQ ID NO: 1712 - RNA, 20 nt, Artificial Sequence
  targeting sequence with ATCN PAM
uugcuuuggccuccuggauu

SEQ ID NO: 1713 - RNA, 20 nt, Artificial Sequence
  targeting sequence with ATCN PAM
aggaggccaaagcaaggauc

SEQ ID NO: 1714 - RNA, 20 nt, Artificial Sequence
  targeting sequence with ATCN PAM
ccauuuugaaaccacucugu

SEQ ID NO: 1715 - RNA, 20 nt, Artificial Sequence
  targeting sequence with ATCN PAM
gugucccugccaggggccag

SEQ ID NO: 1716 - RNA, 20 nt, Artificial Sequence
  targeting sequence with ATCN PAM
acucaagcacccucaucagu

SEQ ID NO: 1717 - RNA, 20 nt, Artificial Sequence
  targeting sequence with ATCN PAM
ugucuagucccuuucugugu

SEQ ID NO: 1718 - RNA, 20 nt, Artificial Sequence
  targeting sequence with ATCN PAM
gcuuuagaaugggcuuugaa

SEQ ID NO: 1719 - RNA, 20 nt, Artificial Sequence
  targeting sequence with ATCN PAM
cacuugugaggaccaagccu

SEQ ID NO: 1720 - RNA, 20 nt, Artificial Sequence
  targeting sequence with ATCN PAM
augagacucaagccugacuu

SEQ ID NO: 1721 - RNA, 20 nt, Artificial Sequence
  targeting sequence with ATCN PAM
cagcuuccuccuccauaaga

SEQ ID NO: 1722 - RNA, 20 nt, Artificial Sequence
  targeting sequence with ATCN PAM
ccuugcaacacaaugaggca

SEQ ID NO: 1723 - RNA, 20 nt, Artificial Sequence
  targeting sequence with ATCN PAM
agggcacuggccuggaguau

SEQ ID NO: 1724 - RNA, 20 nt, Artificial Sequence
  targeting sequence with ATCN PAM
caggugcuuugccuaaggug

SEQ ID NO: 1725 - RNA, 20 nt, Artificial Sequence
  targeting sequence with ATCN PAM
cuguaugaggaaaugaugag

SEQ ID NO: 1726 - RNA, 20 nt, Artificial Sequence
  targeting sequence with ATCN PAM
uuuccucauacagagauguu

SEQ ID NO: 1727 - RNA, 20 nt, Artificial Sequence
  targeting sequence with ATCN PAM
uuacuauuguuuucaucacc

SEQ ID NO: 1728 - RNA, 20 nt, Artificial Sequence
  targeting sequence with ATCN PAM
cccguugcuuuaaaauccag

SEQ ID NO: 1729 - RNA, 20 nt, Artificial Sequence
  targeting sequence with ATCN PAM
agccucugguauaggcaacu

SEQ ID NO: 1730 - RNA, 20 nt, Artificial Sequence
  targeting sequence with ATCN PAM
gugacuuccugcuaccugcc

SEQ ID NO: 1731 - RNA, 20 nt, Artificial Sequence
  targeting sequence with ATCN PAM
agggauggugcccugaggcu

SEQ ID NO: 1732 - RNA, 20 nt, Artificial Sequence
  targeting sequence with ATCN PAM
cuugaugccccaagaggucc

SEQ ID NO: 1733 - RNA, 20 nt, Artificial Sequence
  targeting sequence with ATCN PAM
acucugagccucuuauucca

SEQ ID NO: 1734 - RNA, 20 nt, Artificial Sequence
  targeting sequence with ATCN PAM
uacaugccagccugcugugc

SEQ ID NO: 1735 - RNA, 20 nt, Artificial Sequence
  targeting sequence with ATCN PAM
auccuacaugccagccugcu

SEQ ID NO: 1736 - RNA, 20 nt, Artificial Sequence
  targeting sequence with ATCN PAM
uuccugaacauccauccuac

SEQ ID NO: 1737 - RNA, 20 nt, Artificial Sequence
  targeting sequence with ATCN PAM
cgcuccccuuuggaagugcu

SEQ ID NO: 1738 - RNA, 20 nt, Artificial Sequence
  targeting sequence with ATCN PAM
gcugagcacuuccaaagggg

SEQ ID NO: 1739 - RNA, 20 nt, Artificial Sequence
  targeting sequence with ATCN PAM
gacuccaugaagcgcaccuc

SEQ ID NO: 1740 - RNA, 20 nt, Artificial Sequence
  targeting sequence with ATCN PAM
ucacagugucccugugagua

SEQ ID NO: 1741 - RNA, 20 nt, Artificial Sequence
  targeting sequence with ATCN PAM
uacaaaugaguaaacagagc

SEQ ID NO: 1742 - RNA, 20 nt, Artificial Sequence
  targeting sequence with ATCN PAM
caggccauagagccccugcc

SEQ ID NO: 1743 - RNA, 20 nt, Artificial Sequence
  targeting sequence with ATCN PAM
cuggguggaaagaugguguu

SEQ ID NO: 1744 - RNA, 20 nt, Artificial Sequence
  targeting sequence with ATCN PAM
uuccacccagagauggagac

SEQ ID NO: 1745 - RNA, 20 nt, Artificial Sequence
  targeting sequence with ATCN PAM
cuuuuuuucuuugaguuguu

SEQ ID NO: 1746 - RNA, 20 nt, Artificial Sequence
  targeting sequence with ATCN PAM
gacccucucucuuuaagguc

SEQ ID NO: 1747 - RNA, 20 nt, Artificial Sequence
  targeting sequence with ATCN PAM
ccaucagacccucucucuuu

SEQ ID NO: 1748 - RNA, 20 nt, Artificial Sequence
  targeting sequence with ATCN PAM
cagcauuucacaucugagcu

SEQ ID NO: 1749 - RNA, 20 nt, Artificial Sequence
  targeting sequence with ATCN PAM
gagcuggcuuuccucugccc

SEQ ID NO: 1750 - RNA, 20 nt, Artificial Sequence
  targeting sequence with ATCN PAM
acgcuuccugcugccaugcc

SEQ ID NO: 1751 - RNA, 20 nt, Artificial Sequence
  targeting sequence with ATCN PAM
cggccccucaggagcaggug

SEQ ID NO: 1752 - RNA, 20 nt, Artificial Sequence
  targeting sequence with ATCN PAM
ggguggcgguuugccaggua

SEQ ID NO: 1753 - RNA, 20 nt, Artificial Sequence
  targeting sequence with ATCN PAM
accuggcaaaccgccacccu

SEQ ID NO: 1754 - RNA, 20 nt, Artificial Sequence
  targeting sequence with ATCN PAM
ggacaaaagcaaaaacagac

SEQ ID NO: 1755 - RNA, 20 nt, Artificial Sequence
  targeting sequence with ATCN PAM
guaagguuugcuaccugggu

SEQ ID NO: 1756 - RNA, 20 nt, Artificial Sequence
  targeting sequence with ATCN PAM
auaaaugcaugcauauugca

SEQ ID NO: 1757 - RNA, 20 nt, Artificial Sequence
  targeting sequence with ATCN PAM
aucaauaaaugcaugcauau

SEQ ID NO: 1758 - RNA, 20 nt, Artificial Sequence
  targeting sequence with ATCN PAM
auuuuuuucugagauggggu

SEQ ID NO: 1759 - RNA, 20 nt, Artificial Sequence
  targeting sequence with ATCN PAM
cagaaaaaaauagaucaauc

SEQ ID NO: 1760 - RNA, 20 nt, Artificial Sequence
  targeting sequence with ATCN PAM
ucuggucucagccuccccaa

SEQ ID NO: 1761 - RNA, 20 nt, Artificial Sequence
  targeting sequence with ATCN PAM
caacacuuggggaggcugag

SEQ ID NO: 1762 - RNA, 20 nt, Artificial Sequence
  targeting sequence with ATCN PAM
gagaggccaggugcagcggc

SEQ ID NO: 1763 - RNA, 20 nt, Artificial Sequence
  targeting sequence with ATCN PAM
auuuaacaaaccugcuggga

SEQ ID NO: 1764 - RNA, 20 nt, Artificial Sequence
  targeting sequence with ATCN PAM
cggcagggccuuuucuugcc

SEQ ID NO: 1765 - RNA, 20 nt, Artificial Sequence
  targeting sequence with ATCN PAM
acacagacuugcauuuuaaa

SEQ ID NO: 1766 - RNA, 20 nt, Artificial Sequence
  targeting sequence with ATCN PAM
agaccagaaucaacacagac

SEQ ID NO: 1767 - RNA, 20 nt, Artificial Sequence
  targeting sequence with ATCN PAM
aagaccaagacugucuuuug

SEQ ID NO: 1768 - RNA, 20 nt, Artificial Sequence
  targeting sequence with ATCN PAM
acuugcccuggguacacuga

SEQ ID NO: 1769 - RNA, 20 nt, Artificial Sequence
  targeting sequence with ATCN PAM
cuccccagugccaggaagag

SEQ ID NO: 1770 - RNA, 20 nt, Artificial Sequence
  targeting sequence with ATCN PAM
auuuuaguggaggaagacag

SEQ ID NO: 1771 - RNA, 20 nt, Artificial Sequence
  targeting sequence with ATCN PAM
uuucaguacucuauauuaau

SEQ ID NO: 1772 - RNA, 20 nt, Artificial Sequence
  targeting sequence with ATCN PAM
caucuuuucaguacucuaua

SEQ ID NO: 1773 - RNA, 20 nt, Artificial Sequence
  targeting sequence with ATCN PAM
ccaccugggggccuuugcuu

SEQ ID NO: 1774 - RNA, 20 nt, Artificial Sequence
  targeting sequence with ATCN PAM
cauaacuauucccaccucuc

SEQ ID NO: 1775 - RNA, 20 nt, Artificial Sequence
  targeting sequence with ATCN PAM
aggccagaccacacuccucu

SEQ ID NO: 1776 - RNA, 20 nt, Artificial Sequence
  targeting sequence with ATCN PAM
gaaccucucacuguggccua

SEQ ID NO: 1777 - RNA, 20 nt, Artificial Sequence
  targeting sequence with ATCN PAM
cuucucagcucagcagcuag

SEQ ID NO: 1778 - RNA, 20 nt, Artificial Sequence
  targeting sequence with ATCN PAM
acccaccaggccugcaggcu

SEQ ID NO: 1779 - RNA, 20 nt, Artificial Sequence
  targeting sequence with ATCN PAM
ucccccucucccacccacau

SEQ ID NO: 1780 - RNA, 20 nt, Artificial Sequence
  targeting sequence with ATCN PAM
guccaggggcccgagccuug

SEQ ID NO: 1781 - RNA, 20 nt, Artificial Sequence
  targeting sequence with ATCN PAM
cacuuaauggcaacuccauc

SEQ ID NO: 1782 - RNA, 20 nt, Artificial Sequence
  targeting sequence with ATCN PAM
guuucagagggaugaguuug

SEQ ID NO: 1783 - RNA, 20 nt, Artificial Sequence
  targeting sequence with ATCN PAM
cucugaaacugauggcccca

SEQ ID NO: 1784 - RNA, 20 nt, Artificial Sequence
  targeting sequence with ATCN PAM
gucuaucuccacggcccuca

SEQ ID NO: 1785 - RNA, 20 nt, Artificial Sequence
  targeting sequence with ATCN PAM
ccacggcccucaaaccaggc

SEQ ID NO: 1786 - RNA, 20 nt, Artificial Sequence
  targeting sequence with ATCN PAM
cccaccccgcaccucccacc

SEQ ID NO: 1787 - RNA, 20 nt, Artificial Sequence
  targeting sequence with ATCN PAM
uucugugaggccaaagugca

SEQ ID NO: 1788 - RNA, 20 nt, Artificial Sequence
  targeting sequence with ATCN PAM
gcugccggagccggcaccug

SEQ ID NO: 1789 - RNA, 20 nt, Artificial Sequence
  targeting sequence with ATCN PAM
caggaugggugucuggggag

SEQ ID NO: 1790 - RNA, 20 nt, Artificial Sequence
  targeting sequence with ATCN PAM
ugggauggggcugucacugg

SEQ ID NO: 1791 - RNA, 20 nt, Artificial Sequence
  targeting sequence with ATCN PAM
ccucgugccaggccauggag

SEQ ID NO: 1792 - RNA, 20 nt, Artificial Sequence
  targeting sequence with ATCN PAM
ccauccccucgugccaggcc

SEQ ID NO: 1793 - RNA, 20 nt, Artificial Sequence
  targeting sequence with ATCN PAM
gcacauugggagcagcuggc

SEQ ID NO: 1794 - RNA, 20 nt, Artificial Sequence
  targeting sequence with ATCN PAM
ucaggucuccaccaaggagg

SEQ ID NO: 1795 - RNA, 20 nt, Artificial Sequence
  targeting sequence with ATCN PAM
ugccuccuugguggagaccu

SEQ ID NO: 1796 - RNA, 20 nt, Artificial Sequence
  targeting sequence with ATCN PAM
augggaagaauccugccucc

SEQ ID NO: 1797 - RNA, 20 nt, Artificial Sequence
  targeting sequence with ATCN PAM
uuggggggugagugugaaag

SEQ ID NO: 1798 - RNA, 20 nt, Artificial Sequence
  targeting sequence with ATCN PAM
gcaccuuucacacucacccc

SEQ ID NO: 1799 - RNA, 20 nt, Artificial Sequence
  targeting sequence with ATCN PAM
ccagcuaacuguggagaagc

SEQ ID NO: 1800 - RNA, 20 nt, Artificial Sequence
  targeting sequence with ATCN PAM
gggagcccccaggggcuucu

SEQ ID NO: 1801 - RNA, 20 nt, Artificial Sequence
  targeting sequence with ATCN PAM
agaaagcuaagccuccauua

SEQ ID NO: 1802 - RNA, 20 nt, Artificial Sequence
  targeting sequence with ATCN PAM
agccagaggcuggagacagg

SEQ ID NO: 1803 - RNA, 20 nt, Artificial Sequence
  targeting sequence with ATCN PAM
ccuaggacugacucggcagu

SEQ ID NO: 1804 - RNA, 20 nt, Artificial Sequence
  targeting sequence with ATCN PAM
gcguuucuggcucaguuccu

SEQ ID NO: 1805 - RNA, 20 nt, Artificial Sequence
  targeting sequence with ATCN PAM
cucaccgagcuuccuggucu

SEQ ID NO: 1806 - RNA, 20 nt, Artificial Sequence
  targeting sequence with ATCN PAM
uucugccaucacucaccgag

SEQ ID NO: 1807 - RNA, 20 nt, Artificial Sequence
  targeting sequence with ATCN PAM
cccaggccugauucacuggc

SEQ ID NO: 1808 - RNA, 20 nt, Artificial Sequence
  targeting sequence with ATCN PAM
ggccugggugauaacggaaa

SEQ ID NO: 1809 - RNA, 20 nt, Artificial Sequence
  targeting sequence with ATCN PAM
ccgccaggccagugaaucag

SEQ ID NO: 1810 - RNA, 20 nt, Artificial Sequence
  targeting sequence with ATCN PAM
uuugggucuguccucucugu

SEQ ID NO: 1811 - RNA, 20 nt, Artificial Sequence
  targeting sequence with ATCN PAM
ucaaguuacaaaagcaaaac

SEQ ID NO: 1812 - RNA, 20 nt, Artificial Sequence
  targeting sequence with ATCN PAM
cccuaggcagucaagucuau

SEQ ID NO: 1813 - RNA, 20 nt, Artificial Sequence
  targeting sequence with ATCN PAM
aauacuuggcuuacucaacu

SEQ ID NO: 1814 - RNA, 20 nt, Artificial Sequence
  targeting sequence with ATCN PAM
ugaguacaaguauugggcaa

SEQ ID NO: 1815 - RNA, 20 nt, Artificial Sequence
  targeting sequence with ATCN PAM
ccaguacuugcccaauacuu

SEQ ID NO: 1816 - RNA, 20 nt, Artificial Sequence
  targeting sequence with ATCN PAM
uaggaaugaaaugaaugucu

SEQ ID NO: 1817 - RNA, 20 nt, Artificial Sequence
  targeting sequence with ATCN PAM
agagugcuguagggcaccug

SEQ ID NO: 1818 - RNA, 20 nt, Artificial Sequence
  targeting sequence with ATCN PAM
ggcacuguaacuuauuccgu

SEQ ID NO: 1819 - RNA, 20 nt, Artificial Sequence
  targeting sequence with ATCN PAM
ugaaaaaagccauggacuua

SEQ ID NO: 1820 - RNA, 20 nt, Artificial Sequence
  targeting sequence with ATCN PAM
gagacuguucugaauuuuaa

SEQ ID NO: 1821 - RNA, 20 nt, Artificial Sequence
  targeting sequence with ATCN PAM
caguacuuugggaggcugag

SEQ ID NO: 1822 - RNA, 20 nt, Artificial Sequence
  targeting sequence with ATCN PAM
uccugccucagccucccaaa

SEQ ID NO: 1823 - RNA, 20 nt, Artificial Sequence
  targeting sequence with ATCN PAM
uuuaaauuuuuuuauagaga

SEQ ID NO: 1824 - RNA, 20 nt, Artificial Sequence
  targeting sequence with ATCN PAM
gccuccugaguagccgggac

SEQ ID NO: 1825 - RNA, 20 nt, Artificial Sequence
  targeting sequence with ATCN PAM
ucacugcacugcagccuggg

SEQ ID NO: 1826 - RNA, 20 nt, Artificial Sequence
  targeting sequence with ATCN PAM
cugcacugcagccuggguua

SEQ ID NO: 1827 - RNA, 20 nt, Artificial Sequence
  targeting sequence with ATCN PAM
uuaugcacucuguaacccag

SEQ ID NO: 1828 - RNA, 20 nt, Artificial Sequence
  targeting sequence with ATCN PAM
cauucaaugugggaccucca

SEQ ID NO: 1829 - RNA, 20 nt, Artificial Sequence
  targeting sequence with ATCN PAM
caggcaaaauuccucccaga

SEQ ID NO: 1830 - RNA, 20 nt, Artificial Sequence
  targeting sequence with ATCN PAM
gggaggaauuuugccugaga

SEQ ID NO: 1831 - RNA, 20 nt, Artificial Sequence
  targeting sequence with ATCN PAM
gucaacucuugaaugcuuuc

SEQ ID NO: 1832 - RNA, 20 nt, Artificial Sequence
  targeting sequence with ATCN PAM
cugcccguuggaaccuaggc

SEQ ID NO: 1833 - RNA, 20 nt, Artificial Sequence
  targeting sequence with ATCN PAM
aguaucagcugguuagagau

SEQ ID NO: 1834 - RNA, 20 nt, Artificial Sequence
  targeting sequence with ATCN PAM
gcugguuagagauccacacc

SEQ ID NO: 1835 - RNA, 20 nt, Artificial Sequence
  targeting sequence with ATCN PAM
cuaaccagcugauacuugau

SEQ ID NO: 1836 - RNA, 20 nt, Artificial Sequence
  targeting sequence with ATCN PAM
acacccugacagcucuguga

SEQ ID NO: 1837 - RNA, 20 nt, Artificial Sequence
  targeting sequence with ATCN PAM
cagagcugucagggugugga

SEQ ID NO: 1838 - RNA, 20 nt, Artificial Sequence
  targeting sequence with ATCN PAM
cuggugaccaccugcuaacc

SEQ ID NO: 1839 - RNA, 20 nt, Artificial Sequence
  targeting sequence with ATCN PAM
gggaggaagggguguggcuu

SEQ ID NO: 1840 - RNA, 20 nt, Artificial Sequence
  targeting sequence with ATCN PAM
ggacuagcaaauagggaagg

SEQ ID NO: 1841 - RNA, 20 nt, Artificial Sequence
  targeting sequence with ATCN PAM
cacaggucucagucucauuc

SEQ ID NO: 1842 - RNA, 20 nt, Artificial Sequence
  targeting sequence with ATCN PAM
agcaagaagcccagugugac

SEQ ID NO: 1843 - RNA, 20 nt, Artificial Sequence
  targeting sequence with ATCN PAM
ugucgcuggucacacugggc

SEQ ID NO: 1844 - RNA, 20 nt, Artificial Sequence
  targeting sequence with ATCN PAM
augcuggggaccacuuggga

SEQ ID NO: 1845 - RNA, 20 nt, Artificial Sequence
  targeting sequence with ATCN PAM
ccaccaaagcuuuuggcucu

SEQ ID NO: 1846 - RNA, 20 nt, Artificial Sequence
  targeting sequence with ATCN PAM
accuaaguucagcauccucc

SEQ ID NO: 1847 - RNA, 20 nt, Artificial Sequence
  targeting sequence with ATCN PAM
uccucuaagcuuugcagaug

SEQ ID NO: 1848 - RNA, 20 nt, Artificial Sequence
  targeting sequence with ATCN PAM
gcaaagcuuagaggaggaug

SEQ ID NO: 1849 - RNA, 20 nt, Artificial Sequence
  targeting sequence with ATCN PAM
ugaaauggucagccccucca

SEQ ID NO: 1850 - RNA, 20 nt, Artificial Sequence
  targeting sequence with ATCN PAM
acagcauuuagcaccaggca

SEQ ID NO: 1851 - RNA, 20 nt, Artificial Sequence
  targeting sequence with ATCN PAM
gaacacagccguagugggcg

SEQ ID NO: 1852 - RNA, 20 nt, Artificial Sequence
  targeting sequence with ATCN PAM
acuuccuuuugaaauuuuau

SEQ ID NO: 1853 - RNA, 20 nt, Artificial Sequence
  targeting sequence with ATCN PAM
uguuuauaaaauuucaaaag

SEQ ID NO: 1854 - RNA, 20 nt, Artificial Sequence
  targeting sequence with ATCN PAM
aggugugugcaguuaccuuc

SEQ ID NO: 1855 - RNA, 20 nt, Artificial Sequence
  targeting sequence with ATCN PAM
gacuuacccuguccugcccc

SEQ ID NO: 1856 - RNA, 20 nt, Artificial Sequence
  targeting sequence with ATCN PAM
ucagacuuacccuguccugc

SEQ ID NO: 1857 - RNA, 20 nt, Artificial Sequence
  targeting sequence with ATCN PAM
caccacgacuucuccuggag

SEQ ID NO: 1858 - RNA, 20 nt, Artificial Sequence
  targeting sequence with ATCN PAM
cagcgggcaucucaccacga

SEQ ID NO: 1859 - RNA, 20 nt, Artificial Sequence
  targeting sequence with ATCN PAM
ugggaaagaaaacaagcauc

SEQ ID NO: 1860 - RNA, 20 nt, Artificial Sequence
  targeting sequence with ATCN PAM
gccaucuuaagaucggccuc

SEQ ID NO: 1861 - RNA, 20 nt, Artificial Sequence
  targeting sequence with ATCN PAM
uaagaucggccucacuaagg

SEQ ID NO: 1862 - RNA, 20 nt, Artificial Sequence
  targeting sequence with ATCN PAM
uaagauggccgauucugccc

SEQ ID NO: 1863 - RNA, 20 nt, Artificial Sequence
  targeting sequence with ATCN PAM
gccucacuaagggagcuucu

SEQ ID NO: 1864 - RNA, 20 nt, Artificial Sequence
  targeting sequence with ATCN PAM
ucauccaaaaaauuggcagu

SEQ ID NO: 1865 - RNA, 20 nt, Artificial Sequence
  targeting sequence with ATCN PAM
aaaaaauuggcaguaaaaau

SEQ ID NO: 1866 - RNA, 20 nt, Artificial Sequence
  targeting sequence with ATCN PAM
gcagguucauugacuguagc

SEQ ID NO: 1867 - RNA, 20 nt, Artificial Sequence
  targeting sequence with ATCN PAM
agugguuaccagcaaaguga

SEQ ID NO: 1868 - RNA, 20 nt, Artificial Sequence
  targeting sequence with ATCN PAM
uuuucacuuugcugguaacc

SEQ ID NO: 1869 - RNA, 20 nt, Artificial Sequence
  targeting sequence with ATCN PAM
uguugcuuauauuguugcug

SEQ ID NO: 1870 - RNA, 20 nt, Artificial Sequence
  targeting sequence with ATCN PAM
gaagcguauaauauacacgg

SEQ ID NO: 1871 - RNA, 20 nt, Artificial Sequence
  targeting sequence with ATCN PAM
uccaccguguauauuauacg

SEQ ID NO: 1872 - RNA, 20 nt, Artificial Sequence
  targeting sequence with ATCN PAM
ugaugaagcuuuacagugag

SEQ ID NO: 1873 - RNA, 20 nt, Artificial Sequence
  targeting sequence with ATCN PAM
ggaucguccaccguguauau

SEQ ID NO: 1874 - RNA, 20 nt, Artificial Sequence
  targeting sequence with ATCN PAM
ggagugaaauugccacuucu

SEQ ID NO: 1875 - RNA, 20 nt, Artificial Sequence
  targeting sequence with ATCN PAM
cuggcgacugcacucucagg

SEQ ID NO: 1876 - RNA, 20 nt, Artificial Sequence
  targeting sequence with ATCN PAM
ucgcuggcgacugcacucuc

SEQ ID NO: 1877 - RNA, 20 nt, Artificial Sequence
  targeting sequence with ATCN PAM
caguguggaucaucgccagc

SEQ ID NO: 1878 - RNA, 20 nt, Artificial Sequence
  targeting sequence with ATCN PAM
acacugggauaucaucgcug

SEQ ID NO: 1879 - RNA, 20 nt, Artificial Sequence
  targeting sequence with ATCN PAM
ucgccagcauuucaagguca

SEQ ID NO: 1880 - RNA, 20 nt, Artificial Sequence
  targeting sequence with ATCN PAM
ccagcauuucaaggucaugu

SEQ ID NO: 1881 - RNA, 20 nt, Artificial Sequence
  targeting sequence with ATCN PAM
cuuggugaggaugugggcgg

SEQ ID NO: 1882 - RNA, 20 nt, Artificial Sequence
  targeting sequence with ATCN PAM
ucaccaagagauuguguggg

SEQ ID NO: 1883 - RNA, 20 nt, Artificial Sequence
  targeting sequence with ATCN PAM
cauuucaaacugcaagacca

SEQ ID NO: 1884 - RNA, 20 nt, Artificial Sequence
  targeting sequence with ATCN PAM
ucucaguguguuugacaaag

SEQ ID NO: 1885 - RNA, 20 nt, Artificial Sequence
  targeting sequence with ATCN PAM
cauuacugugcucucgccau

SEQ ID NO: 1886 - RNA, 20 nt, Artificial Sequence
  targeting sequence with ATCN PAM
gccuggccacaugcccacac

SEQ ID NO: 1887 - RNA, 20 nt, Artificial Sequence
  targeting sequence with ATCN PAM
gacagugaaaaccuggcacu

SEQ ID NO: 1888 - RNA, 20 nt, Artificial Sequence
  targeting sequence with ATCN PAM
caccaugcacagaacuaggg

SEQ ID NO: 1889 - RNA, 20 nt, Artificial Sequence
  targeting sequence with ATCN PAM
auuuagucguauuuccaaag

SEQ ID NO: 1890 - RNA, 20 nt, Artificial Sequence
  targeting sequence with ATCN PAM
uaaaccuugacugacuuuuc

SEQ ID NO: 1891 - RNA, 20 nt, Artificial Sequence
  targeting sequence with ATCN PAM
uuugcuuuugcuuaaaacau

SEQ ID NO: 1892 - RNA, 20 nt, Artificial Sequence
  targeting sequence with ATCN PAM
gcaaucguuugcuuuugcuu

SEQ ID NO: 1893 - RNA, 20 nt, Artificial Sequence
  targeting sequence with ATCN PAM
caugauuuaagacuacaguu

SEQ ID NO: 1894 - RNA, 20 nt, Artificial Sequence
  targeting sequence with ATCN PAM
ugugaucugcaaucguuugc

SEQ ID NO: 1895 - RNA, 20 nt, Artificial Sequence
  targeting sequence with ATCN PAM
uuuuaaugcuuggagacaua

SEQ ID NO: 1896 - RNA, 20 nt, Artificial Sequence
  targeting sequence with ATCN PAM
uaaagugcuuuuauuuugcu

SEQ ID NO: 1897 - RNA, 20 nt, Artificial Sequence
  targeting sequence with ATCN PAM
guuuggggaacaacucauaa

SEQ ID NO: 1898 - RNA, 20 nt, Artificial Sequence
  targeting sequence with ATCN PAM
auuacuuaaagaaguuauga

SEQ ID NO: 1899 - RNA, 20 nt, Artificial Sequence
  targeting sequence with ATCN PAM
aauuauaucagaaaaauauc

SEQ ID NO: 1900 - RNA, 20 nt, Artificial Sequence
  targeting sequence with ATCN PAM
gaaaaauaucuucaagagcu

SEQ ID NO: 1901 - RNA, 20 nt, Artificial Sequence
  targeting sequence with ATCN PAM
ucaagagcuuaguauuuccc

SEQ ID NO: 1902 - RNA, 20 nt, Artificial Sequence
  targeting sequence with ATCN PAM
aaaauugggaaauacuaagc

SEQ ID NO: 1903 - RNA, 20 nt, Artificial Sequence
  targeting sequence with ATCN PAM
ugauccugguaaccuuucau

SEQ ID NO: 1904 - RNA, 20 nt, Artificial Sequence
  targeting sequence with ATCN PAM
ggaucaaaaauugggaaaua

SEQ ID NO: 1905 - RNA, 20 nt, Artificial Sequence
  targeting sequence with ATCN PAM
ugguaaccuuucaucaagau

SEQ ID NO: 1906 - RNA, 20 nt, Artificial Sequence
  targeting sequence with ATCN PAM
agauccaagcuuaugcauag

SEQ ID NO: 1907 - RNA, 20 nt, Artificial Sequence
  targeting sequence with ATCN PAM
ugaugaaagguuaccaggau

SEQ ID NO: 1908 - RNA, 20 nt, Artificial Sequence
  targeting sequence with ATCN PAM
aagcuuaugcauaggguucu

SEQ ID NO: 1909 - RNA, 20 nt, Artificial Sequence
  targeting sequence with ATCN PAM
agacccaucugaaauucuau

SEQ ID NO: 1910 - RNA, 20 nt, Artificial Sequence
  targeting sequence with ATCN PAM
gaaauucuauacaaauaggg

SEQ ID NO: 1911 - RNA, 20 nt, Artificial Sequence
  targeting sequence with ATCN PAM
uuacaucauuuuaaauugga

SEQ ID NO: 1912 - RNA, 20 nt, Artificial Sequence
  targeting sequence with ATCN PAM
uuuuaaauuggauauuccug

SEQ ID NO: 1913 - RNA, 20 nt, Artificial Sequence
  targeting sequence with ATCN PAM
aauuuaaaaugauguaaaga

SEQ ID NO: 1914 - RNA, 20 nt, Artificial Sequence
  targeting sequence with ATCN PAM
ugcaguaauauuaaacagga

SEQ ID NO: 1915 - RNA, 20 nt, Artificial Sequence
  targeting sequence with ATCN PAM
aaaagcagcuugcuuuuucu

SEQ ID NO: 1916 - RNA, 20 nt, Artificial Sequence
  targeting sequence with ATCN PAM
uagagaaagcaacagcuuua

SEQ ID NO: 1917 - RNA, 20 nt, Artificial Sequence
  targeting sequence with ATCN PAM
ccacagaaaugugaauccac

SEQ ID NO: 1918 - RNA, 20 nt, Artificial Sequence
  targeting sequence with ATCN PAM
acauauagaccacgcucccg

SEQ ID NO: 1919 - RNA, 20 nt, Artificial Sequence
  targeting sequence with ATCN PAM
gcugucccgggagcgugguc

SEQ ID NO: 1920 - RNA, 20 nt, Artificial Sequence
  targeting sequence with ATCN PAM
acaugccggaguucucccac

SEQ ID NO: 1921 - RNA, 20 nt, Artificial Sequence
  targeting sequence with ATCN PAM
uguauuucucaaggaaagca

SEQ ID NO: 1922 - RNA, 20 nt, Artificial Sequence
  targeting sequence with ATCN PAM
gcccaagucacagcagcuuu

SEQ ID NO: 1923 - RNA, 20 nt, Artificial Sequence
  targeting sequence with ATCN PAM
ccaggcucuuccaaaggguu

SEQ ID NO: 1924 - RNA, 20 nt, Artificial Sequence
  targeting sequence with ATCN PAM
cgaacccuuuggaagagccu

SEQ ID NO: 1925 - RNA, 20 nt, Artificial Sequence
  targeting sequence with ATCN PAM
gaaucucgaacccuuuggaa

SEQ ID NO: 1926 - RNA, 20 nt, Artificial Sequence
  targeting sequence with ATCN PAM
aguauugugucuugacuccu

SEQ ID NO: 1927 - RNA, 20 nt, Artificial Sequence
  targeting sequence with ATCN PAM
cuagaggaacaugcccagcc

SEQ ID NO: 1928 - RNA, 20 nt, Artificial Sequence
  targeting sequence with ATCN PAM
acaucaucaaggucacuucu

SEQ ID NO: 1929 - RNA, 20 nt, Artificial Sequence
  targeting sequence with ATCN PAM
ucaaggucacuucucaacuc

SEQ ID NO: 1930 - RNA, 20 nt, Artificial Sequence
  targeting sequence with ATCN PAM
aggucacuucucaacucacc

SEQ ID NO: 1931 - RNA, 20 nt, Artificial Sequence
  targeting sequence with ATCN PAM
ucaugggagauucugaaccc

SEQ ID NO: 1932 - RNA, 20 nt, Artificial Sequence
  targeting sequence with ATCN PAM
ugggagauucugaacccugc

SEQ ID NO: 1933 - RNA, 20 nt, Artificial Sequence
  targeting sequence with ATCN PAM
cccaugaugauuggugaguu

SEQ ID NO: 1934 - RNA, 20 nt, Artificial Sequence
  targeting sequence with ATCN PAM
ggcaacuuaaugcaauguuu

SEQ ID NO: 1935 - RNA, 20 nt, Artificial Sequence
  targeting sequence with ATCN PAM
aaggguaauaaaaugugaua

SEQ ID NO: 1936 - RNA, 20 nt, Artificial Sequence
  targeting sequence with ATCN PAM
cauuuuauuacccuuugaua

SEQ ID NO: 1937 - RNA, 20 nt, Artificial Sequence
  targeting sequence with ATCN PAM
aauauuugacaauucaugau

SEQ ID NO: 1938 - RNA, 20 nt, Artificial Sequence
  targeting sequence with ATCN PAM
ugaauugucaaauauuagau

SEQ ID NO: 1939 - RNA, 20 nt, Artificial Sequence
  targeting sequence with ATCN PAM
uagaaauguacauguuuuac

SEQ ID NO: 1940 - RNA, 20 nt, Artificial Sequence
  targeting sequence with ATCN PAM
cauuuagucagugaaacaac

SEQ ID NO: 1941 - RNA, 20 nt, Artificial Sequence
  targeting sequence with ATCN PAM
cugcucugcguucucacaug

SEQ ID NO: 1942 - RNA, 20 nt, Artificial Sequence
  targeting sequence with ATCN PAM
augccucucccagcuuuauc

SEQ ID NO: 1943 - RNA, 20 nt, Artificial Sequence
  targeting sequence with ATCN PAM
guguggccuuuggcuuacac

SEQ ID NO: 1944 - RNA, 20 nt, Artificial Sequence
  targeting sequence with ATCN PAM
uucugaauacucaccgugug

SEQ ID NO: 1945 - RNA, 20 nt, Artificial Sequence
  targeting sequence with ATCN PAM
gccccauggcacacggugag

SEQ ID NO: 1946 - RNA, 20 nt, Artificial Sequence
  targeting sequence with ATCN PAM
aguuggagcuggggugggga

SEQ ID NO: 1947 - RNA, 20 nt, Artificial Sequence
  targeting sequence with ATCN PAM
aauguacucucuuccuucca

SEQ ID NO: 1948 - RNA, 20 nt, Artificial Sequence
  targeting sequence with ATCN PAM
cagcuacuugggaggcugag

SEQ ID NO: 1949 - RNA, 20 nt, Artificial Sequence
  targeting sequence with ATCN PAM
cuggaaccugggagaaggag

SEQ ID NO: 1950 - RNA, 20 nt, Artificial Sequence
  targeting sequence with ATCN PAM
caccucacugcuaccuccuu

SEQ ID NO: 1951 - RNA, 20 nt, Artificial Sequence
  targeting sequence with ATCN PAM
caaaaaaaaaaaaaaaaaaa

SEQ ID NO: 1952 - RNA, 20 nt, Artificial Sequence
  targeting sequence with ATCN PAM
gaaaauggggguggggaggu

SEQ ID NO: 1953 - RNA, 20 nt, Artificial Sequence
  targeting sequence with ATCN PAM
agcaccugcgcaccucccca

SEQ ID NO: 1954 - RNA, 20 nt, Artificial Sequence
  targeting sequence with ATCN PAM
agcaggacuguguugaggau

SEQ ID NO: 1955 - RNA, 20 nt, Artificial Sequence
  targeting sequence with ATCN PAM
ucaacacaguccugcuugau

SEQ ID NO: 1956 - RNA, 20 nt, Artificial Sequence
  targeting sequence with ATCN PAM
ccucaccuccaccccugcuu

SEQ ID NO: 1957 - RNA, 20 nt, Artificial Sequence
  targeting sequence with ATCN PAM
uuacagauguaggcagagag

SEQ ID NO: 1958 - RNA, 20 nt, Artificial Sequence
  targeting sequence with ATCN PAM
guaaggauccccucaccucc

SEQ ID NO: 1959 - RNA, 20 nt, Artificial Sequence
  targeting sequence with ATCN PAM
gccccucucugccuacaucu

SEQ ID NO: 1960 - RNA, 20 nt, Artificial Sequence
  targeting sequence with ATCN PAM
cggacagcucccuuugaaag

SEQ ID NO: 1961 - RNA, 20 nt, Artificial Sequence
  targeting sequence with ATCN PAM
cacacacagcacccccaugu

SEQ ID NO: 1962 - RNA, 20 nt, Artificial Sequence
  targeting sequence with ATCN PAM
agucugaggucuuuaaggua

SEQ ID NO: 1963 - RNA, 20 nt, Artificial Sequence
  targeting sequence with ATCN PAM
agcucucuuguucuugacgu

SEQ ID NO: 1964 - RNA, 20 nt, Artificial Sequence
  targeting sequence with ATCN PAM
aaggugggugcggagagaau

SEQ ID NO: 1965 - RNA, 20 nt, Artificial Sequence
  targeting sequence with ATCN PAM
uccugcccucacuccauauu

SEQ ID NO: 1966 - RNA, 20 nt, Artificial Sequence
  targeting sequence with ATCN PAM
agcgcuccuggcgcucuucc

SEQ ID NO: 1967 - RNA, 20 nt, Artificial Sequence
  targeting sequence with ATCN PAM
uagccgacugcucggcagca

SEQ ID NO: 1968 - RNA, 20 nt, Artificial Sequence
  targeting sequence with ATCN PAM
cucacucgcucuucagccuc

SEQ ID NO: 1969 - RNA, 20 nt, Artificial Sequence
  targeting sequence with ATCN PAM
agaacgcuccacccugccag

SEQ ID NO: 1970 - RNA, 20 nt, Artificial Sequence
  targeting sequence with ATCN PAM
ccgcccaccuuggcagagcu

SEQ ID NO: 1971 - RNA, 20 nt, Artificial Sequence
  targeting sequence with ATCN PAM
gcacuguucuugucuccucu

SEQ ID NO: 1972 - RNA, 20 nt, Artificial Sequence
  targeting sequence with ATCN PAM
ccuacuucauuugcagagaa

SEQ ID NO: 1973 - RNA, 20 nt, Artificial Sequence
  targeting sequence with ATCN PAM
cugugcugggcugcaguuac

SEQ ID NO: 1974 - RNA, 20 nt, Artificial Sequence
  targeting sequence with ATCN PAM
gggugacagcugccucacau

SEQ ID NO: 1975 - RNA, 20 nt, Artificial Sequence
  targeting sequence with ATCN PAM
ucauaagcacuaugugaggc

SEQ ID NO: 1976 - RNA, 20 nt, Artificial Sequence
  targeting sequence with ATCN PAM
gaaagauaacacuuaaaaaa

SEQ ID NO: 1977 - RNA, 20 nt, Artificial Sequence
  targeting sequence with ATCN PAM
uucggauccucauaagcacu

SEQ ID NO: 1978 - RNA, 20 nt, Artificial Sequence
  targeting sequence with ATCN PAM
guaacauucauuuaaugggg

SEQ ID NO: 1979 - RNA, 20 nt, Artificial Sequence
  targeting sequence with ATCN PAM
uuacgucuuuccaauagucu

SEQ ID NO: 1980 - RNA, 20 nt, Artificial Sequence
  targeting sequence with ATCN PAM
uuauaguagaaaaagaaaau

SEQ ID NO: 1981 - RNA, 20 nt, Artificial Sequence
  targeting sequence with ATCN PAM
cccugugcccuggcuucauc

SEQ ID NO: 1982 - RNA, 20 nt, Artificial Sequence
  targeting sequence with ATCN PAM
ggacuaccugcaggcugauc

SEQ ID NO: 1983 - RNA, 20 nt, Artificial Sequence
  targeting sequence with ATCN PAM
gccugcagguagucccgaug

SEQ ID NO: 1984 - RNA, 20 nt, Artificial Sequence
  targeting sequence with ATCN PAM
ggguggccagccacaaacac

SEQ ID NO: 1985 - RNA, 20 nt, Artificial Sequence
  targeting sequence with ATCN PAM
cagcucagcauaugcacuaa

SEQ ID NO: 1986 - RNA, 20 nt, Artificial Sequence
  targeting sequence with ATCN PAM
cuagagggcagcgcugguaa

SEQ ID NO: 1987 - RNA, 20 nt, Artificial Sequence
  targeting sequence with ATCN PAM
uguuuucccucagcugugga

SEQ ID NO: 1988 - RNA, 20 nt, Artificial Sequence
  targeting sequence with ATCN PAM
acagcagguauaacggucag

SEQ ID NO: 1989 - RNA, 20 nt, Artificial Sequence
  targeting sequence with ATCN PAM
ggaagcaguaaugggucgga

SEQ ID NO: 1990 - RNA, 20 nt, Artificial Sequence
  targeting sequence with ATCN PAM
ucugcaggacacguuagcgu

SEQ ID NO: 1991 - RNA, 20 nt, Artificial Sequence
  targeting sequence with ATCN PAM
gaccuucagugggaccggag

SEQ ID NO: 1992 - RNA, 20 nt, Artificial Sequence
  targeting sequence with ATCN PAM
cagucaccagaacccccuca

SEQ ID NO: 1993 - RNA, 20 nt, Artificial Sequence
  targeting sequence with ATCN PAM
gcacaaauuuguguaagugu

SEQ ID NO: 1994 - RNA, 20 nt, Artificial Sequence
  targeting sequence with ATCN PAM
guuuucuuuucauagaaauc

SEQ ID NO: 1995 - RNA, 20 nt, Artificial Sequence
  targeting sequence with ATCN PAM
aauuguuucuucugcuuguu

SEQ ID NO: 1996 - RNA, 20 nt, Artificial Sequence
  targeting sequence with ATCN PAM
ucaacucauaccucucuucu

SEQ ID NO: 1997 - RNA, 20 nt, Artificial Sequence
  targeting sequence with ATCN PAM
uccauaagugauuuagacca

SEQ ID NO: 1998 - RNA, 20 nt, Artificial Sequence
  targeting sequence with ATCN PAM
cuuauggaggauuuucagug

SEQ ID NO: 1999 - RNA, 20 nt, Artificial Sequence
  targeting sequence with ATCN PAM
acuggaaaaaccuuucagcg

SEQ ID NO: 2000 - RNA, 20 nt, Artificial Sequence
  targeting sequence with ATCN PAM
gagaugaaaggucaaaaaug

SEQ ID NO: 2001 - RNA, 20 nt, Artificial Sequence
  targeting sequence with ATCN PAM
cagaugucagaacauuacug

SEQ ID NO: 2002 - RNA, 20 nt, Artificial Sequence
  targeting sequence with ATCN PAM
gaggugacaaauaagccccc

SEQ ID NO: 2003 - RNA, 20 nt, Artificial Sequence
  targeting sequence with ATCN PAM
aaugguagaaacugugaacc

SEQ ID NO: 2004 - RNA, 20 nt, Artificial Sequence
  targeting sequence with ATCN PAM
caaguaggguacaagucuac

SEQ ID NO: 2005 - RNA, 20 nt, Artificial Sequence
  targeting sequence with ATCN PAM
cauaaagcgauucaagaccu

SEQ ID NO: 2006 - RNA, 20 nt, Artificial Sequence
  targeting sequence with ATCN PAM
cuuuaugugauggaaggucu

SEQ ID NO: 2007 - RNA, 20 nt, Artificial Sequence
  targeting sequence with ATCN PAM
ucaucccuaccuuuuccccu

SEQ ID NO: 2008 - RNA, 20 nt, Artificial Sequence
  targeting sequence with ATCN PAM
ucccuaccuuuuccccuaug

SEQ ID NO: 2009 - RNA, 20 nt, Artificial Sequence
  targeting sequence with ATCN PAM
cuaccuuuuccccuaugaag

SEQ ID NO: 2010 - RNA, 20 nt, Artificial Sequence
  targeting sequence with ATCN PAM
ugugugcauuaaauuugucc

SEQ ID NO: 2011 - RNA, 20 nt, Artificial Sequence
  targeting sequence with ATCN PAM
gaaaacacuuuaaggucagu

SEQ ID NO: 2012 - RNA, 20 nt, Artificial Sequence
  targeting sequence with ATCN PAM
cuagaacugaauauggagac

SEQ ID NO: 2013 - RNA, 20 nt, Artificial Sequence
  targeting sequence with ATCN PAM
ugucaggaaaaaucucuaga

SEQ ID NO: 2014 - RNA, 20 nt, Artificial Sequence
  targeting sequence with ATCN PAM
auaauagcacaucuugucag

SEQ ID NO: 2015 - RNA, 20 nt, Artificial Sequence
  targeting sequence with ATCN PAM
gguguccugcagcuaaggag

SEQ ID NO: 2016 - RNA, 20 nt, Artificial Sequence
  targeting sequence with ATCN PAM
ccucggucaucagguguccu

SEQ ID NO: 2017 - RNA, 20 nt, Artificial Sequence
  targeting sequence with ATCN PAM
caaauauaaagacaacugaa

SEQ ID NO: 2018 - RNA, 20 nt, Artificial Sequence
  targeting sequence with ATCN PAM
ucugaaacugaaacucugga

SEQ ID NO: 2019 - RNA, 20 nt, Artificial Sequence
  targeting sequence with ATCN PAM
ccagaacucuuuucaucuuc

SEQ ID NO: 2020 - RNA, 20 nt, Artificial Sequence
  targeting sequence with ATCN PAM
aucuccagaacucuuuucau

SEQ ID NO: 2021 - RNA, 20 nt, Artificial Sequence
  targeting sequence with ATCN PAM
ccaccauccaucuccagaac

SEQ ID NO: 2022 - RNA, 20 nt, Artificial Sequence
  targeting sequence with ATCN PAM
gugugaauguacuuaaaguc

SEQ ID NO: 2023 - RNA, 20 nt, Artificial Sequence
  targeting sequence with ATCN PAM
gccuguguucaaguuuucac

SEQ ID NO: 2024 - RNA, 20 nt, Artificial Sequence
  targeting sequence with ATCN PAM
uggguaguuuaagugacaug

SEQ ID NO: 2025 - RNA, 20 nt, Artificial Sequence
  targeting sequence with ATCN PAM
uuguaacaacuucaugaggu

SEQ ID NO: 2026 - RNA, 20 nt, Artificial Sequence
  targeting sequence with ATCN PAM
uauuucaucuuuguaacaac

SEQ ID NO: 2027 - RNA, 20 nt, Artificial Sequence
  targeting sequence with ATCN PAM
ugucaccuguagcuccugag

SEQ ID NO: 2028 - RNA, 20 nt, Artificial Sequence
  targeting sequence with ATCN PAM
gcccugauuccugccuuucu

SEQ ID NO: 2029 - RNA, 20 nt, Artificial Sequence
  targeting sequence with ATCN PAM
gggcagauauggaggcuuua

SEQ ID NO: 2030 - RNA, 20 nt, Artificial Sequence
  targeting sequence with ATCN PAM
ggccuuaugucagaaaggca

SEQ ID NO: 2031 - RNA, 20 nt, Artificial Sequence
  targeting sequence with ATCN PAM
cagaaaagcucacccaucag

SEQ ID NO: 2032 - RNA, 20 nt, Artificial Sequence
  targeting sequence with ATCN PAM
uuauagaaucccagaaaagc

SEQ ID NO: 2033 - RNA, 20 nt, Artificial Sequence
  targeting sequence with ATCN PAM
gucacucuuuuaauacuucc

SEQ ID NO: 2034 - RNA, 20 nt, Artificial Sequence
  targeting sequence with ATCN PAM
caaaaaaauaugaggggaag

SEQ ID NO: 2035 - RNA, 20 nt, Artificial Sequence
  targeting sequence with ATCN PAM
ugcaaauagguuucuguacc

SEQ ID NO: 2036 - RNA, 20 nt, Artificial Sequence
  targeting sequence with ATCN PAM
gacucagucagggccugcuu

SEQ ID NO: 2037 - RNA, 20 nt, Artificial Sequence
  targeting sequence with ATCN PAM
aaaccgggcacauguucccc

SEQ ID NO: 2038 - RNA, 20 nt, Artificial Sequence
  targeting sequence with ATCN PAM
uguggacaguagucgcugcu

SEQ ID NO: 2039 - RNA, 20 nt, Artificial Sequence
  targeting sequence with ATCN PAM
aagcugagggaagagaaaag

SEQ ID NO: 2040 - RNA, 20 nt, Artificial Sequence
  targeting sequence with ATCN PAM
acaaacuauuuuaauaaaca

SEQ ID NO: 2041 - RNA, 20 nt, Artificial Sequence
  targeting sequence with ATCN PAM
guuuauuaaaauaguuuguc

SEQ ID NO: 2042 - RNA, 20 nt, Artificial Sequence
  targeting sequence with ATCN PAM
cuaaauucuaauggguggaa

SEQ ID NO: 2043 - RNA, 20 nt, Artificial Sequence
  targeting sequence with ATCN PAM
ggcaguaaaaaguuuuguuc

SEQ ID NO: 2044 - RNA, 20 nt, Artificial Sequence
  targeting sequence with ATCN PAM
uauuacugagaguaguucua

SEQ ID NO: 2045 - RNA, 20 nt, Artificial Sequence
  targeting sequence with ATCN PAM
aaaaguacuagaacuacucu

SEQ ID NO: 2046 - RNA, 20 nt, Artificial Sequence
  targeting sequence with ATCN PAM
aucuaaaaguacuagaacua

SEQ ID NO: 2047 - RNA, 20 nt, Artificial Sequence
  targeting sequence with ATCN PAM
uaaaauuucauuuaucaauc

SEQ ID NO: 2048 - RNA, 20 nt, Artificial Sequence
  targeting sequence with ATCN PAM
ccugcucuauguuuuaggga

SEQ ID NO: 2049 - RNA, 20 nt, Artificial Sequence
  targeting sequence with ATCN PAM
cuaaaacauagagcagguga

SEQ ID NO: 2050 - RNA, 20 nt, Artificial Sequence
  targeting sequence with ATCN PAM
cugcacuuugggaggcaaag

SEQ ID NO: 2051 - RNA, 20 nt, Artificial Sequence
  targeting sequence with ATCN PAM
acccgccuuugccucccaaa

SEQ ID NO: 2052 - RNA, 20 nt, Artificial Sequence
  targeting sequence with ATCN PAM
cuugaggucaggaguuugag

SEQ ID NO: 2053 - RNA, 20 nt, Artificial Sequence
  targeting sequence with ATCN PAM
uguugcucaggcuggucuca

SEQ ID NO: 2054 - RNA, 20 nt, Artificial Sequence
  targeting sequence with ATCN PAM
caccuacuugggaggcugag

SEQ ID NO: 2055 - RNA, 20 nt, Artificial Sequence
  targeting sequence with ATCN PAM
ucccaccucagccucccaag

SEQ ID NO: 2056 - RNA, 20 nt, Artificial Sequence
  targeting sequence with ATCN PAM
cuugagcuuguggggcagag

SEQ ID NO: 2057 - RNA, 20 nt, Artificial Sequence
  targeting sequence with ATCN PAM
cagcucacugcaaacucugc

SEQ ID NO: 2058 - RNA, 20 nt, Artificial Sequence
  targeting sequence with ATCN PAM
ugccacugcacucuagacug

SEQ ID NO: 2059 - RNA, 20 nt, Artificial Sequence
  targeting sequence with ATCN PAM
uuuuucuacaacagaaaaag

SEQ ID NO: 2060 - RNA, 20 nt, Artificial Sequence
  targeting sequence with ATCN PAM
cuuaauacauagcaaaaucu

SEQ ID NO: 2061 - RNA, 20 nt, Artificial Sequence
  targeting sequence with ATCN PAM
aaaaugauucagauuaagug

SEQ ID NO: 2062 - RNA, 20 nt, Artificial Sequence
  targeting sequence with ATCN PAM
uuuuagauuuugcuauguau

SEQ ID NO: 2063 - RNA, 20 nt, Artificial Sequence
  targeting sequence with ATCN PAM
gaaucauuuuagauuuugcu

SEQ ID NO: 2064 - RNA, 20 nt, Artificial Sequence
  targeting sequence with ATCN PAM
ugcgucucagguuuugguuu

SEQ ID NO: 2065 - RNA, 20 nt, Artificial Sequence
  targeting sequence with ATCN PAM
gggaguggccguuagcuugu

SEQ ID NO: 2066 - RNA, 20 nt, Artificial Sequence
  targeting sequence with ATCN PAM
ugccuuaucugguaaaagaa

SEQ ID NO: 2067 - RNA, 20 nt, Artificial Sequence
  targeting sequence with ATCN PAM
gguaaaagaaucccaagcua

SEQ ID NO: 2068 - RNA, 20 nt, Artificial Sequence
  targeting sequence with ATCN PAM
caagcuacaccuuccugacu

SEQ ID NO: 2069 - RNA, 20 nt, Artificial Sequence
  targeting sequence with ATCN PAM
ucucacccuacacauuucuc

SEQ ID NO: 2070 - RNA, 20 nt, Artificial Sequence
  targeting sequence with ATCN PAM
cuggguuuuaauuuuucuga

SEQ ID NO: 2071 - RNA, 20 nt, Artificial Sequence
  targeting sequence with ATCN PAM
gucacuguagaucccaccga

SEQ ID NO: 2072 - RNA, 20 nt, Artificial Sequence
  targeting sequence with ATCN PAM
acagugacugauacaguaga

SEQ ID NO: 2073 - RNA, 20 nt, Artificial Sequence
  targeting sequence with ATCN PAM
caccgagaguagcaggaggc

SEQ ID NO: 2074 - RNA, 20 nt, Artificial Sequence
  targeting sequence with ATCN PAM
auuguucuggccaguucugc

SEQ ID NO: 2075 - RNA, 20 nt, Artificial Sequence
  targeting sequence with ATCN PAM
acauauuuacuauagacauu

SEQ ID NO: 2076 - RNA, 20 nt, Artificial Sequence
  targeting sequence with ATCN PAM
auuuucugucucaaacacaa

SEQ ID NO: 2077 - RNA, 20 nt, Artificial Sequence
  targeting sequence with ATCN PAM
uauacaaguagagcgaguca

SEQ ID NO: 2078 - RNA, 20 nt, Artificial Sequence
  targeting sequence with ATCN PAM
ucaauaaccugggaaaggaa

SEQ ID NO: 2079 - RNA, 20 nt, Artificial Sequence
  targeting sequence with ATCN PAM
cuuggguagaauuauaaaga

SEQ ID NO: 2080 - RNA, 20 nt, Artificial Sequence
  targeting sequence with ATCN PAM
cagcacuuugcaaggccaag

SEQ ID NO: 2081 - RNA, 20 nt, Artificial Sequence
  targeting sequence with ATCN PAM
uccugccuuggccuugcaaa

SEQ ID NO: 2082 - RNA, 20 nt, Artificial Sequence
  targeting sequence with ATCN PAM
cuugaggccaggaguucuga

SEQ ID NO: 2083 - RNA, 20 nt, Artificial Sequence
  targeting sequence with ATCN PAM
ugcuuuguugcccaggcuag

SEQ ID NO: 2084 - RNA, 20 nt, Artificial Sequence
  targeting sequence with ATCN PAM
caucucuaaaaaauaaaaaa

SEQ ID NO: 2085 - RNA, 20 nt, Artificial Sequence
  targeting sequence with ATCN PAM
cuaaaaaauaaaaaaagaaa

SEQ ID NO: 2086 - RNA, 20 nt, Artificial Sequence
  targeting sequence with ATCN PAM
uuuugccucagccuccugua

SEQ ID NO: 2087 - RNA, 20 nt, Artificial Sequence
  targeting sequence with ATCN PAM
uuugugccuaggacuuugag

SEQ ID NO: 2088 - RNA, 20 nt, Artificial Sequence
  targeting sequence with ATCN PAM
caaauauaucuuaaaacuaa

SEQ ID NO: 2089 - RNA, 20 nt, Artificial Sequence
  targeting sequence with ATCN PAM
uaaaacuaagagaaaaaacu

SEQ ID NO: 2090 - RNA, 20 nt, Artificial Sequence
  targeting sequence with ATCN PAM
auguguugcuaucaacuaga

SEQ ID NO: 2091 - RNA, 20 nt, Artificial Sequence
  targeting sequence with ATCN PAM
acuagaucuauaguucucug

SEQ ID NO: 2092 - RNA, 20 nt, Artificial Sequence
  targeting sequence with ATCN PAM
aguugauagcaacacauaga

SEQ ID NO: 2093 - RNA, 20 nt, Artificial Sequence
  targeting sequence with ATCN PAM
auaguucucuguggguuaug

SEQ ID NO: 2094 - RNA, 20 nt, Artificial Sequence
  targeting sequence with ATCN PAM
uaaaguauauguccucauaa

SEQ ID NO: 2095 - RNA, 20 nt, Artificial Sequence
  targeting sequence with ATCN PAM
uaaggauaagagguuuaugc

SEQ ID NO: 2096 - RNA, 20 nt, Artificial Sequence
  targeting sequence with ATCN PAM
uuaggaucauaaaguauaug

SEQ ID NO: 2097 - RNA, 20 nt, Artificial Sequence
  targeting sequence with ATCN PAM
uagcuguauuucuaguucuu

SEQ ID NO: 2098 - RNA, 20 nt, Artificial Sequence
  targeting sequence with ATCN PAM
acaacaaacccauauaguuu

SEQ ID NO: 2099 - RNA, 20 nt, Artificial Sequence
  targeting sequence with ATCN PAM
aucaacaacaaacccauaua

SEQ ID NO: 2100 - RNA, 20 nt, Artificial Sequence
  targeting sequence with ATCN PAM
cuaaggagcaauaaucugcc

SEQ ID NO: 2101 - RNA, 108 nt, Artificial Sequence
  gNA Variant Scaffold
uacuggcgcuuuuaucucauuacuuugagagccaucaccagcgacuaugucguauggguaaagcgcaggugggacgaccucucggucguccuaucugaagcaucaaag

SEQ ID NO: 2102 - RNA, 99 nt, Artificial Sequence
  gNA Variant Scaffold
uacuggcgcuuuuaucucauuacuuugagagccaucaccagcgacuaugucguauggguaaagcgcugcucgacgcguccucgagcagaagcaucaaag

SEQ ID NO: 2103 - RNA, 97 nt, Artificial Sequence
  gNA Variant Scaffold
uacuggcgcuuuuaucucauuacuuugagagccaucaccagcgacuaugucguauggguaaagcgcugcucgcuccguucgagcagaagcaucaaag

SEQ ID NO: 2104 - RNA, 91 nt, Artificial Sequence
  gNA Variant Scaffold
guacuggcgcuuuuaucucauuacuuugagagccaucaccagcgacuaugucguauggguaaagcgcccucuucggagggaagcaucaaag

SEQ ID NO: 2105 - RNA, 99 nt, Artificial Sequence
  gNA Variant Scaffold
uacuggcgcuuuuaucucauuacuuugagagccaucaccagcgacuaugucguauggguaaagcgcaggaguuucuauggaaacccugaagcaucaaag

SEQ ID NO: 2106 - RNA, 99 nt, Artificial Sequence
  gNA Variant Scaffold
guacuggcgccuuuaucucauuacuuugagagccaucaccagcgacuaugucguauggguaaagcgcuuacggacuucgguccguaagaagcaucaaag

SEQ ID NO: 2107 - RNA, 90 nt, Artificial Sequence
  gNA Variant Scaffold
uacuggcgcuuuuaucucauuacuuugagagccaucaccagcgacuaugucguauggguaaagcgcugcgcuugcgcagaagcaucaaag

SEQ ID NO: 2108 - RNA, 108 nt, Artificial Sequence
  gNA Variant Scaffold
uacuggcgcuuuuaucugauuacuuugagagccaucaccagcgacuaugucguauggguaaagcgcuuauuuaucggagagaaauccgauaaauaagaagcaucaaag

SEQ ID NO: 2109 - RNA, 108 nt, Artificial Sequence
  gNA Variant Scaffold
uacuggcgcuuuuaucgcauuacuuugagagccaucaccagcgacuaugucguauggguaaagcgcuuauuuaucggagagaaauccgauaaauaagaagcaucaaag

SEQ ID NO: 2110 - RNA, 110 nt, Artificial Sequence
  gNA Variant Scaffold
uacuggcgcuuuuaucucauuacuuugagagccaucaccagcgacuaugucguauggguaaagcgcuuauuuaucggagacuucgguccgauaaauaagaagcaucaaag

SEQ ID NO: 2111 - RNA, 97 nt, Artificial Sequence
  gNA Variant Scaffold
uacuggcgcuuuuaucucauuacuuugagagccaucaccagcgacuaugucguauggguaaagcgcacaugaggauuacccaugugaagcaucaaag

SEQ ID NO: 2112 - RNA, 106 nt, Artificial Sequence
  gNA Variant Scaffold
gcuggcgcuuuuaucucauuacuuugagagccaucaccagcgacuaugucguauggguaaagcgcuuauuuaucgugagaaauccgauaaauaagaagcaucaaag

SEQ ID NO: 2113 - RNA, 96 nt, Artificial Sequence
  gNA Variant Scaffold
uacuggcgcuuuuaucucauuacuuugagagccaucaccagcgacuaugucguauggguaaagcgcugcaugucuaagacagcagaagcaucaaag

SEQ ID NO: 2114 - RNA, 90 nt, Artificial Sequence
  gNA Variant Scaffold
uacuggcgcuuuuaucucauuacuuugagagccaucaccagcgacuaugucguauggguaaagcgcagggcuucggccgaagcaucaaag

SEQ ID NO: 2115 - RNA, 98 nt, Artificial Sequence
  gNA Variant Scaffold
uacuggcgcuuuuaucucauuacuuugagagccaucaccagcgacuaugucguauggguaaagcgcaauccauugcacuccggauugaagcaucaaag

SEQ ID NO: 2116 - RNA, 108 nt, Artificial Sequence
  gNA Variant Scaffold
uacuggcgcuuuucucgcauuacuuugagagccaucaccagcgacuaugucguauggguaaagcgcuuauuuaucggagagaaauccgauaaauaagaagcaucaaag

SEQ ID NO: 2117 - RNA, 108 nt, Artificial Sequence
  gNA Variant Scaffold
uacuggcgcuuuuaucucauuacuuugagagccaucaccagcgacuaugucguauggguaaagcgcuuauuuaucggacuucgguccgauaaauaagaagcaucaaag

SEQ ID NO: 2118 - RNA, 100 nt, Artificial Sequence
  gNA Variant Scaffold
uacuggcgcuuuuaucucauuacuuugagagccaucaccagcgacuaugucguauggguaaagcgcugcucguuugcggcuacgagcagaagcaucaaag

SEQ ID NO: 2119 - RNA, 100 nt, Artificial Sequence
  gNA Variant Scaffold
uacuggcgcuuuuaucucauuacuuugagagccaucaccagcgacuaugucguauggguaaagcgcuuauuuaucgagagauaaauaagaagcaucaaag

SEQ ID NO: 2120 - RNA, 107 nt, Artificial Sequence
  gNA Variant Scaffold
uacggcgcuuuuaucucauuacuuugagagccaucaccagcgacuaugucguauggguaaagcgcuuauuuaucggagagaaauccgauaaauaagaagcaucaaag

SEQ ID NO: 2121 - RNA, 99 nt, Artificial Sequence
  gNA Variant Scaffold
uacuggcgccuuuuaucucauuacuuugagagccaucaccagcgacuaugucguauggguaaagcgcuuacggacuucgguccguaagaagcaucaaag

SEQ ID NO: 2122 - RNA, 108 nt, Artificial Sequence
  gNA Variant Scaffold
uacuggcgcuuuuaucucauuacuuugagagccaucaccagcgacuaugucguaucgguaaagcgcuuauuuaucggagagaaauccgauaaauaagaagcaucaaag

SEQ ID NO: 2123 - RNA, 108 nt, Artificial Sequence
  gNA Variant Scaffold
uacuggcgccuuuaucucauuacuuugagagccaucaccagcgacuaugucguauggguaaagcgcuuauuuaucggacuucgguccgauaaauaagaagcaucaaag

SEQ ID NO: 2124 - RNA, 105 nt, Artificial Sequence
  gNA Variant Scaffold
uacuggcgcuuuuaucucauuacuuugagagccaucaccagcgacuaugucguauggguaaagcgcuuauuuaucgagaaauccgauaaauaagaagcaucaaag

SEQ ID NO: 2125 - RNA, 103 nt, Artificial Sequence
  gNA Variant Scaffold
gcgcuuuuaucucauuacuuugagagccaucaccagcgacuaugucguauggguaaagcgcuuauuuaucggagagaaauccgauaaauaagaagcaucaaag

SEQ ID NO: 2126 - RNA, 103 nt, Artificial Sequence
  gNA Variant Scaffold
uacuggcgcuuuuaucucauuacuuugagagccaucaccagcgacuaugucguauggguaaagcgcuuauuuaucggagagagauaaauaagaagcaucaaag

SEQ ID NO: 2127 - RNA, 108 nt, Artificial Sequence
  gNA Variant Scaffold
uacuggcgcuuuuaucucauuacuuuggagagccaucaccagcgacuaugucguauggguaaagcgcuuauuuaucggagaguauccgauaaauaagaagcaucaaag

SEQ ID NO: 2128 - RNA, 109 nt, Artificial Sequence
  gNA Variant Scaffold
uacuggcgcuuuuaucucauuacuuugagagccaucaccagcgacuauguucguauggguaaagcgcuuauuuaucggagagaaauccgauaaauaagaagcaucaaag

SEQ ID NO: 2129 - RNA, 105 nt, Artificial Sequence
  gNA Variant Scaffold
agcgcuuuuaucucauuacuuugagagccaucaccagcgacuaugucguauggguaaagcgcuuauuuaucggagagaaaugccgauaaauaagaagcaucaaag

SEQ ID NO: 2130 - RNA, 109 nt, Artificial Sequence
  gNA Variant Scaffold
uacuggcgcuuuuaucucauuacuuugagagccaucaccagcgacuaugucguauggguaaagcgcuuauuuaucggagagaaauccgauaaaauaagaagcaucaaag

SEQ ID NO: 2131 - RNA, 109 nt, Artificial Sequence
  gNA Variant Scaffold
uacuggcgcuuuuaucucauuacuuugagagccaucaccagcgacuaugucguauggguaaagcgcuuauuguaucggagagaaauccgauaaauaagaagcaucaaag

SEQ ID NO: 2132 - RNA, 102 nt, Artificial Sequence
  gNA Variant Scaffold
gcgcuuuuaucucauuacuuugagagccaucaccagcgacuaugucguauggguaaagcgcuuauuuaucggacuucgguccgauaaauaagcgcaucaaag

SEQ ID NO: 2133 - RNA, 108 nt, Artificial Sequence
  gNA Variant Scaffold
uacuggcgcuuuucucucauuacuuugagagccaucaccagcgacuaugucguauggguaaagcgcuuauuuaucggagagaaauccgauaaauaagaagcaucaaag

SEQ ID NO: 2134 - RNA, 106 nt, Artificial Sequence
  gNA Variant Scaffold
guggcgcuuuuaucucauuacuuugagagccaucaccagcgacuaugucguauggguaaagcgcuuauuuaucggagagaaauccgauaaauaagaagcaucaaag

SEQ ID NO: 2135 - RNA, 110 nt, Artificial Sequence
  gNA Variant Scaffold
uacuggcgcuuuuaucucauuacuuugagagccaucaccagcgaccuuaugucguauggguaaagcgcuuauuuaucggagagaaauccgauaaauaagaagcaucaaag

SEQ ID NO: 2136 - RNA, 107 nt, Artificial Sequence
  gNA Variant Scaffold
gauggcgcuuuuaucucauuacuuugagagccaucaccagcgacuaugucguauggguaaagcgcuuauuuaucggacuucgguccgauaaauaagaagcaucaaag

SEQ ID NO: 2137 - RNA, 106 nt, Artificial Sequence
  gNA Variant Scaffold
uacuggcgcuuuuaucucauuacuuugagagccaucaccagcgacuaugucguauggguaaagcgcuuauuuaucggagagaaauccgauaaaagaagcaucaaag

SEQ ID NO: 2138 - RNA, 109 nt, Artificial Sequence
  gNA Variant Scaffold
uacuggcgcuuuuaucucauuacuuugagagccaucaccagcgaucuaugucguauggguaaagcgcuuauuuaucggagagaaauccgauaaauaagaagcaucaaag

SEQ ID NO: 2139 - RNA, 106 nt, Artificial Sequence
  gNA Variant Scaffold
uacuggcgcuuuuaucucauuacuuugagagccaucaccagcgacuaugucguauggguaaaggcuuauuuaucggagagaaauccgauaaaaagaagcaucaaag

SEQ ID NO: 2140 - RNA, 107 nt, Artificial Sequence
  gNA Variant Scaffold
uacuggcgcuuuuaucucauuacuuugagagccaucaccagcgacuaugucguauggguaaagcgcuuauuuaucggagagaaauccgauaaaaagaagcaucaaag

SEQ ID NO: 2141 - RNA, 107 nt, Artificial Sequence
  gNA Variant Scaffold
uacuggcgcuuuaucucauuacuuugagagccaucaccagcgacuaugucguauggguaaagcgcuuauuuaucggacuucgguccgauaaauaagaagcaucaaag

SEQ ID NO: 2142 - RNA, 98 nt, Artificial Sequence
  gNA Variant Scaffold
cggcgcuuuucucgcauuacuuugagagccaucaccagcgacuaugucguauggguaaagcgcuuauuguaucgagagauaaauaagaagcaucaaag

SEQ ID NO: 2143 - RNA, 107 nt, Artificial Sequence
  gNA Variant Scaffold
cacuggcgcuuuuaucucauuacuuugagagccaucaccagcgacuaugucguauggguaaagcgcuuauuuucggagagaaauccgauaaauaagaagcaucaaag

SEQ ID NO: 2144 - RNA, 106 nt, Artificial Sequence
  gNA Variant Scaffold
uacuggcgcuuuaucucauuacuuugagagccaucaccagcgacuucggucguauggguaaagcgcuuauguaucggcuucggccgauacauaagaagcaucaaag

SEQ ID NO: 2145 - RNA, 107 nt, Artificial Sequence
  gNA Variant Scaffold
uacuggcgcuuuuaucucauuacuuugagagccaucaccagcgacuucggucguauggguaaagcgcuuauguaucggcuucggccgauacauaagaagcaucaaag

SEQ ID NO: 2146 - RNA, 109 nt, Artificial Sequence
  gNA Variant Scaffold
uacuggcgcuuuuaucucauuacuuugagagccaucaccagcgacuaugucguaugggugaaagcgcuuauuuaucggagagaaauccgauaaauaagaagcaucaaag

SEQ ID NO: 2147 - RNA, 64 nt, Artificial Sequence
  gNA Variant Scaffold
uacuggcgcuuuuaucucauuacuuugagagccaucaccagcgacuucggucguauggguaaag

SEQ ID NO: 2148 - RNA, 62 nt, Artificial Sequence
  gNA Variant Scaffold
gaugggcuuuuaucucauuacuuugagagccaucaccagcgacuucggucguauggguaaag

SEQ ID NO: 2149 - RNA, 105 nt, Artificial Sequence
  gNA Variant Scaffold
gaugggcuuuuaucucauuacuuugagagccaucaccagcgacuucggucguauggguaaagcgcuuauuuaucggcuucggccgauaaauaagaagcaucaaag

SEQ ID NO: 2150 - RNA, 156 nt, Artificial Sequence
  gNA Variant Scaffold
uacuggcgcuuuuaucucauuacuuugagagccaucaccagcgacuaugucguauggguaaagcgcuacacugggaucgcugaauuagagaucggcguccuuucauucuauauacuuuggaguuuuaaaaugucucuaaguacagaagcaucaaag

SEQ ID NO: 2151 - RNA, 103 nt, Artificial Sequence
  gNA Variant Scaffold
ggcgcuuuuaucucauuacuuugagagccaucaccagcgacuucggucguauggguaaagcgcuuauuuaucggcuucggccgauaaauaagaagcaucaaag

SEQ ID NO: 2152 - RNA, 106 nt, Artificial Sequence
  gNA Variant Scaffold
gcuggcgcuuuuaucucauuacuuugagagccaucaccagcgacuucggucguauggguaaagcgcuuauuuaucggcuucggccgauaaauaagaagcaucaaag

SEQ ID NO: 2153 - RNA, 109 nt, Artificial Sequence
  gNA Variant Scaffold
uacuggcgcuuuuaucucauuacuuugagagccaucaccagcgacuucggucguauggguaaagcgcuuauuuaucggagagaaauccgauaaauaagaagcaucaaag

SEQ ID NO: 2154 - RNA, 112 nt, Artificial Sequence
  gNA Variant Scaffold
uacuggcgcuuuuaucucauuacuuugagagccaugcuccaccagcgacuaugucguauggguaaagcgcuuauuuaucggagagaaauccgauaaauaagaagcaucaaag

SEQ ID NO: 2155 - RNA, 97 nt, Artificial Sequence
  gNA Variant Scaffold
uacuggcgcuuuuaucucauuacuuugagagccaucaccagcgacuaugucguauggguaaagcgggguuaggguuaggguuagggaagcaucaaag

SEQ ID NO: 2156 - RNA, 96 nt, Artificial Sequence
  gNA Variant Scaffold
uacuggcgcuuuuaucucauuacuuugagagccaucaccagcgacuaugucguauggguaaagcggagggagggagggagagggaaagcaucaaag

SEQ ID NO: 2157 - RNA, 101 nt, Artificial Sequence
  gNA Variant Scaffold
uacuggcgcuuuuaucucauuacuuugagagccaucaccagcgacuaugucguauggguaaagcguuggguuaggguuaggguuagggaaaagcaucaaag

SEQ ID NO: 2158 - RNA, 91 nt, Artificial Sequence
  gNA Variant Scaffold
uacuggcgcuuuuaucucauuacuuugagagccaucaccagcgacuaugucguauggguaaagcgcagggcuucggccggaagcaucaaag

SEQ ID NO: 2159 - RNA, 103 nt, Artificial Sequence
  gNA Variant Scaffold
uacuggcgcuuuuaucucauuacuuugagagccaucaccagcgacuaugucguauggguaaagcgccugcucaguacgagaggaaccgcaggaagcaucaaag

SEQ ID NO: 2160 - RNA, 90 nt, Artificial Sequence
  gNA Variant Scaffold
uacuggcgcuuuuaucugauuacuuugagagccaucaccagcgacuaugucguauggguaaagcgcccucuucggagggaagcaucaaag

SEQ ID NO: 2161 - RNA, 98 nt, Artificial Sequence
  gNA Variant Scaffold
uacuggcgccuuuaucugauuacuuugagagccaucaccagcgacuaugucguauggguaaagcgcuuacggacuucgguccguaagaagcaucaaag

SEQ ID NO: 2162 - RNA, 98 nt, Artificial Sequence
  gNA Variant Scaffold
uacuggcgcuuuuaucugauuacuuugagagccaucaccagcgacuaugucguauggguaaagcgcggacgaccucucggucguccgaagcaucaaag

SEQ ID NO: 2163 - RNA, 108 nt, Artificial Sequence
  gNA Variant Scaffold
uacuggcgcuuuuaucugauuacuuugagagccaucaccagcgacuaugucguauggguaaagcgcaggugggacgaccucucggucguccuaucugaagcaucaaag

SEQ ID NO: 2164 - RNA, 99 nt, Artificial Sequence
  gNA Variant Scaffold
uacuggcgccuuuaucugcauuacuuugagagccaucaccagcgacuaugucguauggguaaagcgcuuacggacuucgguccguaagaagcaucaaag

SEQ ID NO: 2165 - RNA, 97 nt, Artificial Sequence
  gNA Variant Scaffold
gcuggcgcuuuuaucugauuacuuugagagccaucaccagcgacuaugucguauggguaaagcgcuuacggacuucgguccguaagaagcaucaaag

SEQ ID NO: 2166 - RNA, 108 nt, Artificial Sequence
  gNA Variant Scaffold
uacuggcgccuuuaucugauuacuuugagagccaucaccagcgacuaugucguauggguaaagcgcaggugggacgaccucucggucguccuaucugaagcaucaaag

SEQ ID NO: 2167 - RNA, 98 nt, Artificial Sequence
  gNA Variant Scaffold
uacuggcgccuuuaucugauuacuuugagagccaucaccagcgacuaugucguauggguaaagcgcggacgaccucucggucguccgaagcaucaaag

SEQ ID NO: 2168 - RNA, 90 nt, Artificial Sequence
  gNA Variant Scaffold
uacuggcgccuuuaucucauuacuuugagagccaucaccagcgacuaugucguauggguaaagcgcccucuucggagggaagcaucaaag

SEQ ID NO: 2169 - RNA, 98 nt, Artificial Sequence
  gNA Variant Scaffold
uacuggcgcuuuuaucucauuacuuugagagccaucaccagcgacuaugucguauggguaaagcgcuuacggacuucgguccguaagaagcaucaaag

SEQ ID NO: 2170 - RNA, 99 nt, Artificial Sequence
  gNA Variant Scaffold
uacuggcgccuuuaucaucauuacuuugagagccaucaccagcgacuaugucguauggguaaagcgcuuacggacuucgguccguaagaagcaucaaag

SEQ ID NO: 2171 - RNA, 194 nt, Artificial Sequence
  gNA Variant Scaffold
uacuggcgcuuuuaucucauuacuuugagagccaucaccagcgacuaugucguauggguaaagcgcuuauuuaucggagagaaauccgauaaauaagaagcaucaaagggccggcauggucccagccuccucgcuggcgccggcugggcaacauuccgaggggaccguccccucgguaauggcgaaugggaccc

SEQ ID NO: 2172 - RNA, 108 nt, Artificial Sequence
  gNA Variant Scaffold
uacuggcgccuuuaucucauuacuuugagagccaucaccagcgacuaugucguauggguaaagcgcaggugggacgaccucucggucguccuaucugaagcaucaaag

SEQ ID NO: 2173 - RNA, 106 nt, Artificial Sequence
  gNA Variant Scaffold
uacuggcgcuuuuaucucauuacuuugagagccaucaccagcgacuaugucguauggguaaagcgcuuauuuaucggagaaauccgauaaauaagaagcaucaaag

SEQ ID NO: 2174 - RNA, 98 nt, Artificial Sequence
  gNA Variant Scaffold
uacuggcgccuuuaucucauuacuuugagagccaucaccagcgacuaugucguauggguaaagcgcggacgaccucucggucguccgaagcaucaaag

SEQ ID NO: 2175 - RNA, 92 nt, Artificial Sequence
  gNA Variant Scaffold
uacuggcgcuuuuaucucauuacuuugagagccaucaccagcgacuaugucguauggguaaagcgccggacuucgguccggaagcaucaaag

SEQ ID NO: 2176 - RNA, 108 nt, Artificial Sequence
  gNA Variant Scaffold
uacuggcgcuuuuaucggauuacuuugagagccaucaccagcgacuaugucguauggguaaagcgcuuauuuaucggagagaaauccgauaaauaagaagcaucaaag

SEQ ID NO: 2177 - RNA, 98 nt, Artificial Sequence
  gNA Variant Scaffold
uacuggcgcuuuuaucucauuacuuugagagccaucaccagcgacuaugucguauggguaaagcgcggacgaccucucggucguccgaagcaucaaag

SEQ ID NO: 2178 - RNA, 89 nt, Artificial Sequence
  gNA Variant Scaffold
gcuggcgcuuuuaucugauuacuuugagagccaucaccagcgacuaugucguauggguaaagcgcccucuucggagggaagcaucaaag

SEQ ID NO: 2179 - RNA, 88 nt, Artificial Sequence
  gNA Variant Scaffold
gcuggcgccuuuaucugauuacuuugagagccaucaccagcgacuaugucguauggguaaagcucccucuucggagggagcaucaaag

SEQ ID NO: 2180 - RNA, 197 nt, Artificial Sequence
  gNA Variant Scaffold
uacuggcgcuuuuaucucauuacuuugagagccaucaccagcgacuaugucguauggguaaagcgcuuauuuaucggagagaaauccgauaaauaagaagcaucaaaggggucggcauggcaucuccaccuccucgcgguccgaccugggcauccgaaggaggacgcacguccacucggauggcuaagggagagcca

SEQ ID NO: 2181 - RNA, 88 nt, Artificial Sequence
  gNA Variant Scaffold
gcuggcgccuuuaucugauuacuuugagagccaucaccagcgacuaugucguauggguaaagcgcccucuucggagggcgcaucaaag

SEQ ID NO: 2182 - RNA, 186 nt, Artificial Sequence
  gNA Variant Scaffold
uacuggcgcuuuuaucucauuacuuugagagccaucaccagcgacuaugucguauggguaaagcgcuuauuuaucggagagaaauccgauaaauaagaagcaucaaaguuuuggccggcauggucccagccuccucgcuggcgccggcugggcaacaugcuucggcauggcgaaugggaccccggg

SEQ ID NO: 2183 - RNA, 97 nt, Artificial Sequence
  gNA Variant Scaffold
gauggcgccuuuaucucauuacuuugagagccaucaccagcgacuaugucguauggguaaagcgcuuacggacuucgguccguaagaagcaucaaag

SEQ ID NO: 2184 - RNA, 89 nt, Artificial Sequence
  gNA Variant Scaffold
gcuggcgcuuuuaucucauuacuuugagagccaucaccagcgacuaugucguauggguaaagcgcccucuucggagggaagcaucaaag

SEQ ID NO: 2185 - RNA, 96 nt, Artificial Sequence
  gNA Variant Scaffold
gcuggcgccuuuaucugauuacuuugagagccaucaccagcgacuaugucguauggguaaagcucuuacggacuucgguccguaagagcaucaaag

SEQ ID NO: 2186 - RNA, 96 nt, Artificial Sequence
  gNA Variant Scaffold
gcuggcgccuuuaucugauuacuuugagagccaucaccagcgacuaugucguauggguaaagcucggacgaccucucggucguccgagcaucaaag

SEQ ID NO: 2187 - RNA, 160 nt, Artificial Sequence
  gNA Variant Scaffold
uacuggcgcuuuuaucucauuacuuugagagccaucaccagcgacuaugucguauggguaaagcgcuuauuuaucggagagaaauccgauaaauaagaagcaucaaagccugucaccggaugugcuuuccggucugaugaguccgugaggacgaaacagg

SEQ ID NO: 2188 - RNA, 97 nt, Artificial Sequence
  gNA Variant Scaffold
gcuggcgcuuuuaucugauuacuuugagagccaucaccagcgacuaugucguauggguaaagcgcggacgaccucucggucguccgaagcaucaaag

SEQ ID NO: 2189 - RNA, 97 nt, Artificial Sequence
  gNA Variant Scaffold
gcuggcgccuuuaucugauuacuuugagagccaucaccagcgacuaugucguauggguaaagcgcggacgaccucucggucguccgaagcaucaaag

SEQ ID NO: 2190 - RNA, 106 nt, Artificial Sequence
  gNA Variant Scaffold
gcuggcgccuuuaucugauuacuuugagagccaucaccagcgacuaugucguauggguaaagcucaggugggacgaccucucggucguccuaucugagcaucaaag

SEQ ID NO: 2191 - RNA, 177 nt, Artificial Sequence
  gNA Variant Scaffold
uacuggcgcuuuuaucucauuacuuugagagccaucaccagcgacuaugucguauggguaaagcgcuuauuuaucggagagaaauccgauaaauaagaagcaucaaaggauggccggcauggucccagccuccucgcuggcgccggcugggcaacaccuucggguggcgaaugggac

SEQ ID NO: 2192 - RNA, 107 nt, Artificial Sequence
  gNA Variant Scaffold
gcuggcgcuuuuaucugauuacuuugagagccaucaccagcgacuaugucguauggguaaagcgcaggugggacgaccucucggucguccuaucugaagcaucaaag

SEQ ID NO: 2193 - RNA, 109 nt, Artificial Sequence
  gNA Variant Scaffold
uacuggcgcuuuuaucucauuacuuugagagccaucaccagcgacuaugucguacuggguaaagcgcuuauuuaucggagagaaauccgauaaauaagaagcaucaaag

SEQ ID NO: 2194 - RNA, 107 nt, Artificial Sequence
  gNA Variant Scaffold
uacuggcgcuuuuaucucauuacuuugagagccaucaccagcgacuaugucguauggguaaagcgcuuauuuaucgugagaaauccgauaaauaagaagcaucaaag

SEQ ID NO: 2195 - RNA, 109 nt, Artificial Sequence
  gNA Variant Scaffold
guacuggcgcuuuuaucucauuacuuugagagccaucaccagcgacuaugucguauggguaaagcgcuuauuuaucggagagaaauccgauaaauaagaagcaucaaag

SEQ ID NO: 2196 - RNA, 97 nt, Artificial Sequence
  gNA Variant Scaffold
gcuggcgcuuuuaucucauuacuuugagagccaucaccagcgacuaugucguauggguaaagcgcggacgaccucucggucguccgaagcaucaaag

SEQ ID NO: 2197 - RNA, 97 nt, Artificial Sequence
  gNA Variant Scaffold
gcuggcgccuuuaucugauuacuuugagagccaucaccagcgacuaugucguauggguaaagcgcuuacggacuucgguccguaagaagcaucaaag

SEQ ID NO: 2198 - RNA, 107 nt, Artificial Sequence
  gNA Variant Scaffold
gcuggcgcuuuuaucucauuacuuugagagccaucaccagcgacuaugucguauggguaaagcgcuuauuuaucggagagaaauccgauaaauaagaagcaucaaag

SEQ ID NO: 2199 - RNA, 97 nt, Artificial Sequence
  gNA Variant Scaffold
gcuggcgccuuuaucucauuacuuugagagccaucaccagcgacuaugucguauggguaaagcgcuuacggacuucgguccguaagaagcaucaaag

SEQ ID NO: 2200 - RNA, 89 nt, Artificial Sequence
  gNA Variant Scaffold
gcuggcgccuuuaucugauuacuuugagagccaucaccagcgacuaugucguauggguaaagcgcccucuucggagggaagcaucaaag

SEQ ID NO: 2201 - RNA, 107 nt, Artificial Sequence
  gNA Variant Scaffold
gcuggcgcuuuuaucucauuacuuugagagccaucaccagcgacuaugucguauggguaaagcgcaggugggacgaccucucggucguccuaucugaagcaucaaag

SEQ ID NO: 2202 - RNA, 107 nt, Artificial Sequence
  gNA Variant Scaffold
gcuggcgccuuuaucucauuacuuugagagccaucaccagcgacuaugucguauggguaaagcgcaggugggacgaccucucggucguccuaucugaagcaucaaag

SEQ ID NO: 2203 - RNA, 107 nt, Artificial Sequence
  gNA Variant Scaffold
gcuggcgccuuuaucugauuacuuugagagccaucaccagcgacuaugucguauggguaaagcgcaggugggacgaccucucggucguccuaucugaagcaucaaag

SEQ ID NO: 2204 - RNA, 98 nt, Artificial Sequence
  gNA Variant Scaffold
uacuggcgcuuuuaucugauuacuuugagagccaucaccagcgacuaugucguauggguaaagcgcuuacggacuucgguccguaagaagcaucaaag

SEQ ID NO: 2205 - RNA, 89 nt, Artificial Sequence
  gNA Variant Scaffold
gcuggcgccuuuaucucauuacuuugagagccaucaccagcgacuaugucguauggguaaagcgcccucuucggagggaagcaucaaag

SEQ ID NO: 2206 - RNA, 97 nt, Artificial Sequence
  gNA Variant Scaffold
gcuggcgcuuuuaucucauuacuuugagagccaucaccagcgacuaugucguauggguaaagcgcuuacggacuucgguccguaagaagcaucaaag

SEQ ID NO: 2207 - RNA, 97 nt, Artificial Sequence
  gNA Variant Scaffold
gcuggcgccuuuaucucauuacuuugagagccaucaccagcgacuaugucguauggguaaagcgcggacgaccucucggucguccgaagcaucaaag

SEQ ID NO: 2208 - RNA, 177 nt, Artificial Sequence
  gNA Variant Scaffold
gauggccggcauggucccagccuccucgcuggcgccggcugggcaacaccuucggguggcgaaugggacuacuggcgcuuuuaucucauuacuuugagagccaucaccagcgacuaugucguauggguaaagcgcuuauuuaucggagagaaauccgauaaauaagaagcaucaaag

SEQ ID NO: 2209 - RNA, 194 nt, Artificial Sequence
  gNA Variant Scaffold
ggccggcauggucccagccuccucgcuggcgccggcugggcaacauuccgaggggaccguccccucgguaauggcgaaugggacccuacuggcgcuuuuaucucauuacuuugagagccaucaccagcgacuaugucguauggguaaagcgcuuauuuaucggagagaaauccgauaaauaagaagcaucaaag

SEQ ID NO: 2210 - RNA, 96 nt, Artificial Sequence
  gNA Variant Scaffold
gcuggcgccuuuaucugauuacuuugagagccaucaccagcgacuaugucguauggguaaagcgcuuacggacuucgguccguaagcgcaucaaag

SEQ ID NO: 2211 - RNA, 172 nt, Artificial Sequence
  gNA Variant Scaffold
cgugguuagggccacguuaaauaguugcuuaagcccuaagcguugaucuucggaucaggugcaauacuggcgcuuuuaucucauuacuuugagagccaucaccagcgacuaugucguauggguaaagcgcuuauuuaucggagagaaauccgauaaauaagaagcaucaaag

SEQ ID NO: 2212 - RNA, 197 nt, Artificial Sequence
  gNA Variant Scaffold
gggucggcauggcaucuccaccuccucgcgguccgaccugggcauccgaaggaggacgcacguccacucggauggcuaagggagagccauacuggcgcuuuuaucucauuacuuugagagccaucaccagcgacuaugucguauggguaaagcgcuuauuuaucggagagaaauccgauaaauaagaagcaucaaag

SEQ ID NO: 2213 - RNA, 171 nt, Artificial Sequence
  gNA Variant Scaffold
uacuggcgcuuuuaucucauuacuuugagagccaucaccagcgacuaugucguauggguaaagcgcuuauuuaucggagagaaauccgauaaauaagaagcaucaaagccaguacugaugaguccgugaggacgaaacgaguaagcucgucuacuggcgcuuuuaucucau

SEQ ID NO: 2214 - RNA, 99 nt, Artificial Sequence
  gNA Variant Scaffold
uacuggcgccuuuaucucauuacuuuagagagccaucaccagcgacuaugucguauggguaaagcgcuuacggacuucgguccguaagaagcaucaaag

SEQ ID NO: 2215 - RNA, 157 nt, Artificial Sequence
  gNA Variant Scaffold
cgacuacugaugaguccgugaggacgaaacgaguaagcucgucuagucguacuggcgcuuuuaucucauuacuuugagagccaucaccagcgacuaugucguauggguaaagcgcuuauuuaucggagagaaauccgauaaauaagaagcaucaaag

SEQ ID NO: 2216 - RNA, 106 nt, Artificial Sequence
  gNA Variant Scaffold
gcuggcgccuuuaucugauuacuuugagagccaucaccagcgacuaugucguauggguaaagcgcaggugggacgaccucucggucguccuaucugcgcaucaaag

SEQ ID NO: 2217 - RNA, 97 nt, Artificial Sequence
  gNA Variant Scaffold
uacuggcgccuuuaucucauuacuuuagagccaucaccagcgacuaugucguauggguaaagcgcuuacggacuucgguccguaagaagcaucaaag

SEQ ID NO: 2218 - RNA, 186 nt, Artificial Sequence
  gNA Variant Scaffold
uacuggcgcuuuuaucucauuacuuugagagccaucaccagcgacuaugucguauggguaaagcgcuuauuuaucggagagaaauccgauaaauaagaagcaucaaagcauuccucagaaaaugacaaaccuguggggcguaaguagaucuucggaucuaugaucgugcagacguuaaaaucaggu

SEQ ID NO: 2219 - RNA, 171 nt, Artificial Sequence
  gNA Variant Scaffold
uacuggcgcuuuuaucucauuacuuugagagccaucaccagcgacuaugucguauggguaaagcgcuuauuuaucggagagaaauccgauaaauaagaagcaucaaagcgacuacugaugaguccgugaggacgaaacgaguaagcucgucuagucgcguguagcgaagca

SEQ ID NO: 2220 - RNA, 186 nt, Artificial Sequence
  gNA Variant Scaffold
cauuccucagaaaaugacaaaccuguggggcguaaguagaucuucggaucuaugaucgugcagacguuaaaaucagguuacuggcgcuuuuaucucauuacuuugagagccaucaccagcgacuaugucguauggguaaagcgcuuauuuaucggagagaaauccgauaaauaagaagcaucaaag

SEQ ID NO: 2221 - RNA, 186 nt, Artificial Sequence
  gNA Variant Scaffold
uuuuggccggcauggucccagccuccucgcuggcgccggcugggcaacaugcuucggcauggcgaaugggaccccggguacuggcgcuuuuaucucauuacuuugagagccaucaccagcgacuaugucguauggguaaagcgcuuauuuaucggagagaaauccgauaaauaagaagcaucaaag

SEQ ID NO: 2222 - RNA, 171 nt, Artificial Sequence
  gNA Variant Scaffold
cgacuacugaugaguccgugaggacgaaacgaguaagcucgucuagucgcguguagcgaagcauacuggcgcuuuuaucucauuacuuugagagccaucaccagcgacuaugucguauggguaaagcgcuuauuuaucggagagaaauccgauaaauaagaagcaucaaag

SEQ ID NO: 2223 - RNA, 168 nt, Artificial Sequence
  gNA Variant Scaffold
uacuggcgcuuuuaucucauuacuuugagagccaucaccagcgacuaugucguauggguaaagcgcuuauuuaucggagagaaauccgauaaauaagaagcaucaaaggggagccccgcugaugaggucggggagaccgaaagggacuucggucccuacggggcuccc

SEQ ID NO: 2224 - RNA, 144 nt, Artificial Sequence
  gNA Variant Scaffold
ccacccccaccaccacccccacccccaccaccacccuacuggcgcuuuuaucucauuacuuugagagccaucaccagcgacuaugucguauggguaaagcgcuuauuuaucggagagaaauccgauaaauaagaagcaucaaag

SEQ ID NO: 2225 - RNA, 157 nt, Artificial Sequence
  gNA Variant Scaffold
uacuggcgcuuuuaucucauuacuuugagagccaucaccagcgacuaugucguauggguaaagcgcuuauuuaucggagagaaauccgauaaauaagaagcaucaaagcgacuacugaugaguccgugaggacgaaacgaguaagcucgucuagucg

SEQ ID NO: 2226 - RNA, 172 nt, Artificial Sequence
  gNA Variant Scaffold
uacuggcgcuuuuaucucauuacuuugagagccaucaccagcgacuaugucguauggguaaagcgcuuauuuaucggagagaaauccgauaaauaagaagcaucaaagcgugguuagggccacguuaaauaguugcuuaagcccuaagcguugaucuucggaucaggugcaa

SEQ ID NO: 2227 - RNA, 184 nt, Artificial Sequence
  gNA Variant Scaffold
uacuggcgcuuuuaucucauuacuuugagagccaucaccagcgacuaugucguauggguaaagcgcuuauuuaucggagagaaauccgauaaauaagaagcaucaaagggcaauaaagcgguuacaagcccgcaaaaauagcagaguaaugucgcgauagcgcggcauuaaugcagcuuuauug

SEQ ID NO: 2228 - RNA, 122 nt, Artificial Sequence
  gNA Variant Scaffold
uacuggcgcuuuuaucucauuacuauuaucucauuacuuugagagccaucaccagcgacuaugucguauggguaaagcgcuuauuuaucggagagaaauccgauaaauaagaagcaucaaag

SEQ ID NO: 2229 - RNA, 184 nt, Artificial Sequence
  gNA Variant Scaffold
ggcaauaaagcgguuacaagcccgcaaaaauagcagaguaaugucgcgauagcgcggcauuaaugcagcuuuauuguacuggcgcuuuuaucucauuacuuugagagccaucaccagcgacuaugucguauggguaaagcgcuuauuuaucggagagaaauccgauaaauaagaagcaucaaag

SEQ ID NO: 2230 - RNA, 185 nt, Artificial Sequence
  gNA Variant Scaffold
uacuggcgcuuuuaucucauuacuuugagagccaucaccagcgacuaugucguauggguaaagcgcuuauuuaucggagagaaauccgauaaauaagaagcaucaaagacccgcaaggccgacggcauccgccgccgcuggugcaaguccagccgccccuucgggggcgggcgcucauggguaac

SEQ ID NO: 2231 - RNA, 63 nt, Artificial Sequence
  gNA Variant Scaffold
uacuggcgcuuuuaucucauuacuuugagagccaucaccagcgacuaugucguauggguaaag

SEQ ID NO: 2232 - RNA, 168 nt, Artificial Sequence
  gNA Variant Scaffold
gggagccccgcugaugaggucggggagaccgaaagggacuucggucccuacggggcucccuacuggcgcuuuuaucucauuacuuugagagccaucaccagcgacuaugucguauggguaaagcgcuuauuuaucggagagaaauccgauaaauaagaagcaucaaag

SEQ ID NO: 2233 - RNA, 171 nt, Artificial Sequence
  gNA Variant Scaffold
ccaguacugaugaguccgugaggacgaaacgaguaagcucgucuacuggcgcuuuuaucucauuacuggcgcuuuuaucucauuacuuugagagccaucaccagcgacuaugucguauggguaaagcgcuuauuuaucggagagaaauccgauaaauaagaagcaucaaag

SEQ ID NO: 2234 - RNA, 185 nt, Artificial Sequence
  gNA Variant Scaffold
acccgcaaggccgacggcauccgccgccgcuggugcaaguccagccgccccuucgggggcgggcgcucauggguaacuacuggcgcuuuuaucucauuacuuugagagccaucaccagcgacuaugucguauggguaaagcgcuuauuuaucggagagaaauccgauaaauaagaagcaucaaag

SEQ ID NO: 2235 - RNA, 160 nt, Artificial Sequence
  gNA Variant Scaffold
ccugucaccggaugugcuuuccggucugaugaguccgugaggacgaaacagguacuggcgcuuuuaucucauuacuuugagagccaucaccagcgacuaugucguauggguaaagcgcuuauuuaucggagagaaauccgauaaauaagaagcaucaaag

SEQ ID NO: 2236 - RNA, 100 nt, Artificial Sequence
  gNA Variant Scaffold
guacuggcgccuuuaucucauuacuuugagagccaucaccagcgacuaugucguaguggguaaagcgcuuacggacuucgguccguaagaagcaucaaag

SEQ ID NO: 2237 - RNA, 91 nt, Artificial Sequence
  gNA Variant Scaffold
guacuggcgcuuuuaucugauuacuuugagagccaucaccagcgacuaugucguaguggguaaagcucccucuucggagggagcaucaaag

SEQ ID NO: 2238 - RNA, 89 nt, Artificial Sequence
  gNA Variant Scaffold
acuggcgcuuuuaucugauuacuuugagagccaucaccagcgacuaugucguaguggguaaagcucccucuucggagggagcaucaaag

SEQ ID NO: 2239 - RNA, 97 nt, Artificial Sequence
  gNA Variant Scaffold
acuggcgccuuuaucucauuacuuugagagccaucaccagcgacuaugucguauggguaaagcgcuuacggacuucgguccguaagaagcaucaaag

SEQ ID NO: 2240 - RNA, 89 nt, Artificial Sequence
  gNA Variant Scaffold
gcuggcgcuuuuaucugauuacuuugagagccaucaccagcgacuaugucguaguggguaaagcucccucuucggagggagcaucaaag

SEQ ID NO: 2241 - RNA, 88 nt, Artificial Sequence
  gNA Variant Scaffold
acuggcgcuuuuaucugauuacuuugagagccaucaccagcgacuaugucguauggguaaagcucccucuucggagggagcaucaaag

SEQ ID NO: 2242 - RNA, 97 nt, Artificial Sequence
  gNA Variant Scaffold
acuggcgccuuuaucugauuacuuugagagccaucaccagcgacuaugucguauggguaaagcgcuuacggacuucgguccguaagaagcaucaaag

SEQ ID NO: 2243 - RNA, 97 nt, Artificial Sequence
  gNA Variant Scaffold
acuggcgcuuuuaucugauuacuuugagagccaucaccagcgacuaugucguauggguaaagcgcuuacggacuucgguccguaagaagcaucaaag

SEQ ID NO: 2244 - RNA, 98 nt, Artificial Sequence
  gNA Variant Scaffold
acuggcgcuuuuaucugauuacuuugagagccaucaccagcgacuaugucguaguggguaaagcgcuuacggacuucgguccguaagaagcaucaaag

SEQ ID NO: 2245 - RNA, 89 nt, Artificial Sequence
  gNA Variant Scaffold
acuggcgcuuuuaucugauuacuuugagagccaucaccagcgacuaugucguauuggguaaagcucccucuucggagggagcaucaaag

SEQ ID NO: 2246 - RNA, 98 nt, Artificial Sequence
  gNA Variant Scaffold
acuggcgcuuuuaucugauuacuuugagagccaucaccagcgacuaugucguauuggguaaagcgcuuacggacuucgguccguaagaagcaucaaag

SEQ ID NO: 2247 - RNA, 98 nt, Artificial Sequence
  gNA Variant Scaffold
acuggcgccuuuaucaucauuacuuugagagccaucaccagcgacuaugucguauggguaaagcgcuuacggacuucgguccguaagaagcaucaaag

SEQ ID NO: 2248 - RNA, 90 nt, Artificial Sequence
  gNA Variant Scaffold
acuggcgcuuuuaucugauuacuuugagagccaucaccagcgacuaugucguaguggguaaagcgcccucuucggagggaagcaucaaag

SEQ ID NO: 2249 - RNA, 96 nt, Artificial Sequence
  gNA Variant Scaffold
acuggcgcuuuuaucugauuacuuugagagccaucaccagcgacuaugucguaguggguaaagcucacaugaggaucacccaugugagcaucaaag

SEQ ID NO: 2250 - RNA, 89 nt, Artificial Sequence
  gNA Variant Scaffold
acuggcacuuuuaccugauuacuuugagagccaacaccagcgacuaugucguaguggguaaagcucccucuucggagggagcaucaaag

SEQ ID NO: 2251 - RNA, 89 nt, Artificial Sequence
  gNA Variant Scaffold
acuggcacuuuuaucugauuacuuugagagccaucaccagcgacuaugucguaguggguaaagcucccucuucggagggagcaucaaag

SEQ ID NO: 2252 - RNA, 89 nt, Artificial Sequence
  gNA Variant Scaffold
acuggcccuuuuaucugauuacuuugagagccaucaccagcgacuaugucguaguggguaaagcucccucuucggagggagcaucaaag

SEQ ID NO: 2253 - RNA, 89 nt, Artificial Sequence
  gNA Variant Scaffold
acuggcgcuuuuaccugauuacuuugagagccaucaccagcgacuaugucguaguggguaaagcucccucuucggagggagcaucaaag

SEQ ID NO: 2254 - RNA, 89 nt, Artificial Sequence
  gNA Variant Scaffold
acuggcgcuuuuaucugauuacuuugagagccaacaccagcgacuaugucguaguggguaaagcucccucuucggagggagcaucaaag

SEQ ID NO: 2255 - RNA, 97 nt, Artificial Sequence
  gNA Variant Scaffold
acuggcaccuuuaccugauuacuuugagagccaacaccagcgacuaugucguauggguaaagcgcuuacggacuucgguccguaagaagcaucaaag

SEQ ID NO: 2256 - RNA, 97 nt, Artificial Sequence
  gNA Variant Scaffold
acuggcaccuuuaucugauuacuuugagagccaucaccagcgacuaugucguauggguaaagcgcuuacggacuucgguccguaagaagcaucaaag

SEQ ID NO: 2257 - RNA, 97 nt, Artificial Sequence
  gNA Variant Scaffold
acuggccccuuuaucugauuacuuugagagccaucaccagcgacuaugucguauggguaaagcgcuuacggacuucgguccguaagaagcaucaaag

SEQ ID NO: 2258 - RNA, 97 nt, Artificial Sequence
  gNA Variant Scaffold
acuggcgccuuuaucugauuacuuugagagccaacaccagcgacuaugucguauggguaaagcgcuuacggacuucgguccguaagaagcaucaaag

SEQ ID NO: 2259 - RNA, 89 nt, Artificial Sequence; identical to SEQ ID NO: 2240
  gNA Variant Scaffold

SEQ ID NO: 2260 - RNA, 90 nt, Artificial Sequence
  gNA Variant Scaffold
gacuggcgcuuuuaucugauuacuuugagagccaucaccagcgacuaugucguaguggguaaagcucccucuucggagggagcaucaaag

SEQ ID NO: 2261 - RNA, 90 nt, Artificial Sequence
  gNA Variant Scaffold
acuggcgccuuuaucugauuacuuuggagagccaucaccagcgacuaugucguaguggguaaagcucccucuucggagggagcaucaaag

SEQ ID NO: 2262 - RNA, 89 nt, Artificial Sequence
  gNA Variant Scaffold
acuggcgcauuuaucugauuacuuugugagccaucaccagcgacuaugucguaguggguaaagcucccucuucggagggagcaucaaag

SEQ ID NO: 2263 - RNA, 89 nt, Artificial Sequence
  gNA Variant Scaffold
acuggcgccuuuaucugauuacuuugagagccaucaccagcgacuaugucguaguggguaaagcucccucuucggagggagcaucaaag

SEQ ID NO: 2264 - RNA, 90 nt, Artificial Sequence
  gNA Variant Scaffold
acuggcgcuuuuaucugauuacuuuggagagccaucaccagcgacuaugucguaguggguaaagcucccucuucggagggagcaucaaag

SEQ ID NO: 2265 - RNA, 89 nt, Artificial Sequence
  gNA Variant Scaffold
acuggcgcauuuaucugauuacuuugagagccaucaccagcgacuaugucguaguggguaaagcucccucuucggagggagcaucaaag

SEQ ID NO: 2266 - RNA, 89 nt, Artificial Sequence
  gNA Variant Scaffold
acuggcgcuuuuaucugauuacuuugugagccaucaccagcgacuaugucguaguggguaaagcucccucuucggagggagcaucaaag

SEQ ID NO: 2267 - RNA, 90 nt, Artificial Sequence
  gNA Variant Scaffold
acuggcgcuuuuauucugauuacuuugagagccaucaccagcgacuaugucguaguggguaaagcucccucuucggagggagcaucaaag

SEQ ID NO: 2268 - RNA, 88 nt, Artificial Sequence
  gNA Variant Scaffold
acggcgcuuuuaucugauuacuuugagagccaucaccagcgacuaugucguaguggguaaagcucccucuucggagggagcaucaaag

SEQ ID NO: 2269 - RNA, 89 nt, Artificial Sequence
  gNA Variant Scaffold
acuggcgcuuuuauaugauuacuuugagagccaucaccagcgacuaugucguaguggguaaagcucccucuucggagggagcaucaaag

SEQ ID NO: 2270 - RNA, 90 nt, Artificial Sequence
  gNA Variant Scaffold
acuggcgcuuuuaucuugauuacuuugagagccaucaccagcgacuaugucguaguggguaaagcucccucuucggagggagcaucaaag

SEQ ID NO: 2271 - RNA, 89 nt, Artificial Sequence
  gNA Variant Scaffold
acuggcgcuuuuaucugauuacuuugagagccagcaccagcgacuaugucguaguggguaaagcucccucuucggagggagcaucaaag

SEQ ID NO: 2272 - RNA, 89 nt, Artificial Sequence
  gNA Variant Scaffold
acuggcgcuguuaucugauuacuucgagagccaucaccagcgacuaugucguaguggguaaagcucccucuucggagggagcaucgaag

SEQ ID NO: 2273 - RNA, 89 nt, Artificial Sequence
  gNA Variant Scaffold
acuggcgcucuuaucugauuacuucgagagccaucaccagcgacuaugucguaguggguaaagcucccucuucggagggagcaucgaag

SEQ ID NO: 2274 - RNA, 89 nt, Artificial Sequence
  gNA Variant Scaffold
acuggcgcuuguaucugauuacucugagagccaucaccagcgacuaugucguaguggguaaagcucccucuucggagggagcaucagag

SEQ ID NO: 2275 - RNA, 89 nt, Artificial Sequence
  gNA Variant Scaffold
acuggcgcuucuaucugauuacucugagagccaucaccagcgacuaugucguaguggguaaagcucccucuucggagggagcaucagag

SEQ ID NO: 2276 - RNA, 89 nt, Artificial Sequence
  gNA Variant Scaffold
acuggcgcuuugaucugauuaccuugagagccaucaccagcgacuaugucguaguggguaaagcucccucuucggagggagcaucaagg

SEQ ID NO: 2277 - RNA, 89 nt, Artificial Sequence
  gNA Variant Scaffold
acuggcgcuuucaucugauuaccuugagagccaucaccagcgacuaugucguaguggguaaagcucccucuucggagggagcaucaagg

SEQ ID NO: 2278 - RNA, 89 nt, Artificial Sequence
  gNA Variant Scaffold
acuggcgcuguuaucugauuacuuugagagccaucaccagcgacuaugucguaguggguaaagcucccucuucggagggagcaucaaag

SEQ ID NO: 2279 - RNA, 89 nt, Artificial Sequence
  gNA Variant Scaffold
acuggcgcuuuuaucugauuacuuugagagccaucaccagcgacuaugucguaguggguaaagcucccucuucggagggagcaucgaag

SEQ ID NO: 2280 - RNA, 89 nt, Artificial Sequence
  gNA Variant Scaffold
acuggcgcuuuuaucugauuacuucgagagccaucaccagcgacuaugucguaguggguaaagcucccucuucggagggagcaucaaag

SEQ ID NO: 2281 - RNA, 98 nt, Artificial Sequence
  gNA Variant Scaffold
acuggcacuucuaucugauuacucugagagccaucaccagcgacuaugucguauggguaaagccgcuuacggacuucgguccguaagaggcaucagag

SEQ ID NO: 2282 - RNA, 89 nt, Artificial Sequence
  gNA Variant Scaffold
acuggcacuucuaucugauuacucugagagccaucaccagcgacuaugucguaguggguaaagcucccucuucggagggagcaucagag

SEQ ID NO: 2283 - RNA, 98 nt, Artificial Sequence
  gNA Variant Scaffold
acuggcaccuuuaucugauuacuuugagagccaucaccagcgacuaugucguauggguaaagccgcuuacggacuucgguccguaagaggcaucaaag

SEQ ID NO: 2284 - RNA, 98 nt, Artificial Sequence
  gNA Variant Scaffold
acuggcacuuguaucugauuacucugagagccaucaccagcgacuaugucguauggguaaagccgcuuacggacuucgguccguaagaggcaucagag

SEQ ID NO: 2285 - RNA, 89 nt, Artificial Sequence
  gNA Variant Scaffold
acuggcacuuguaucugauuacucugagagccaucaccagcgacuaugucguaguggguaaagcucccucuucggagggagcaucagag

SEQ ID NO: 2286 - RNA, 20 nt, Artificial Sequence
  targeting sequence with ATCN PAM
gccaaagucuguaaaagcac

SEQ ID NO: 2287 - RNA, 20 nt, Artificial Sequence
  targeting sequence with ATCN PAM
augaugucuuuucuuacuca

SEQ ID NO: 2288 - RNA, 20 nt, Artificial Sequence
  targeting sequence with ATCN PAM
uagaugccauuuguuaaaag

SEQ ID NO: 2289 - RNA, 20 nt, Artificial Sequence
  targeting sequence with ATCN PAM
uuuaauaaagaguuuugagu

SEQ ID NO: 2290 - RNA, 20 nt, Artificial Sequence
  targeting sequence with ATCN PAM
agaauucgaagggaacccag

SEQ ID NO: 2291 - RNA, 20 nt, Artificial Sequence
  targeting sequence with ATCN PAM
uuggaauuuggugacugguu

SEQ ID NO: 2292 - RNA, 20 nt, Artificial Sequence
  targeting sequence with ATCN PAM
agagguauuguggaaagaga

SEQ ID NO: 2293 - RNA, 20 nt, Artificial Sequence
  targeting sequence with ATCN PAM
gucugucccuugccccacca

SEQ ID NO: 2294 - RNA, 20 nt, Artificial Sequence
  targeting sequence with ATCN PAM
ugcauccuucuuuacuccau

SEQ ID NO: 2295 - RNA, 20 nt, Artificial Sequence
  targeting sequence with ATCN PAM
uucuuuacuccauccuucaa

SEQ ID NO: 2296 - RNA, 20 nt, Artificial Sequence
  targeting sequence with ATCN PAM
uucaauacaacugccagagg

SEQ ID NO: 2297 - RNA, 20 nt, Artificial Sequence
  targeting sequence with ATCN PAM
ucuggcaguuguauugaagg

SEQ ID NO: 2298 - RNA, 20 nt, Artificial Sequence
  targeting sequence with ATCN PAM
uacaauugauuacauuucag

SEQ ID NO: 2299 - RNA, 20 nt, Artificial Sequence
  targeting sequence with ATCN PAM
auuguaggauucuuuccacu

SEQ ID NO: 2300 - RNA, 20 nt, Artificial Sequence
  targeting sequence with ATCN PAM
uagacacuauugacuguaug

SEQ ID NO: 2301 - RNA, 20 nt, Artificial Sequence
  targeting sequence with ATCN PAM
aaucuuagacacuauugacu

SEQ ID NO: 2302 - RNA, 20 nt, Artificial Sequence
  targeting sequence with ATCN PAM
uuugcgcuaacacgaugccu

SEQ ID NO: 2303 - RNA, 20 nt, Artificial Sequence
  targeting sequence with ATCN PAM
uguuagcgcaaaugauauua

SEQ ID NO: 2304 - RNA, 20 nt, Artificial Sequence
  targeting sequence with ATCN PAM
cuaucacuccccuucagucc

SEQ ID NO: 2305 - RNA, 20 nt, Artificial Sequence
  targeting sequence with ATCN PAM
cuccccuucaguccccugca

SEQ ID NO: 2306 - RNA, 20 nt, Artificial Sequence
  targeting sequence with ATCN PAM
ucgugucagucaugugucua

SEQ ID NO: 2307 - RNA, 20 nt, Artificial Sequence
  targeting sequence with ATCN PAM
agcauuguuaauugccauuc

SEQ ID NO: 2308 - RNA, 20 nt, Artificial Sequence
  targeting sequence with ATCN PAM
acguucuagcucuaucaccu

SEQ ID NO: 2309 - RNA, 20 nt, Artificial Sequence
  targeting sequence with ATCN PAM
ccuucuggccgacccuggac

SEQ ID NO: 2310 - RNA, 20 nt, Artificial Sequence
  targeting sequence with ATCN PAM
gaguguugcagcuggaagaa

SEQ ID NO: 2311 - RNA, 20 nt, Artificial Sequence
  targeting sequence with ATCN PAM
ccccuacucuuucuuuucuu

SEQ ID NO: 2312 - RNA, 20 nt, Artificial Sequence
  targeting sequence with ATCN PAM
guuuagugacuugaaaucuc

SEQ ID NO: 2313 - RNA, 20 nt, Artificial Sequence
  targeting sequence with ATCN PAM
gauuuuauauauguccauau

SEQ ID NO: 2314 - RNA, 20 nt, Artificial Sequence
  targeting sequence with ATCN PAM
gaucuguuuagugacuugaa

SEQ ID NO: 2315 - RNA, 20 nt, Artificial Sequence
  targeting sequence with ATCN PAM
uaguuuguuuuccagaagau

SEQ ID NO: 2316 - RNA, 20 nt, Artificial Sequence
  targeting sequence with ATCN PAM
ucuggaaaacaaacuaggau

SEQ ID NO: 2317 - RNA, 20 nt, Artificial Sequence
  targeting sequence with ATCN PAM
uuaacucagaguauucccau

SEQ ID NO: 2318 - RNA, 20 nt, Artificial Sequence
  targeting sequence with ATCN PAM
uggcacauuuuucuauuuua

SEQ ID NO: 2319 - RNA, 20 nt, Artificial Sequence
  targeting sequence with ATCN PAM
ucacaaccugugaagucagu

SEQ ID NO: 2320 - RNA, 20 nt, Artificial Sequence
  targeting sequence with ATCN PAM
ccucugauauaggucuguag

SEQ ID NO: 2321 - RNA, 20 nt, Artificial Sequence
  targeting sequence with ATCN PAM
gaggagauuaaguuccucuc

SEQ ID NO: 2322 - RNA, 20 nt, Artificial Sequence
  targeting sequence with ATCN PAM
acuaaucaccugcuucuugu

SEQ ID NO: 2323 - RNA, 20 nt, Artificial Sequence
  targeting sequence with ATCN PAM
ccugcuucuuguuaacacua

SEQ ID NO: 2324 - RNA, 20 nt, Artificial Sequence
  targeting sequence with ATCN PAM
ccacuauaaauacuggugca

SEQ ID NO: 2325 - RNA, 20 nt, Artificial Sequence
  targeting sequence with ATCN PAM
auguaacaguguuggucccu

SEQ ID NO: 2326 - RNA, 20 nt, Artificial Sequence
  targeting sequence with ATCN PAM
uugcucacgcuaccccaggg

SEQ ID NO: 2327 - RNA, 20 nt, Artificial Sequence
  targeting sequence with ATCN PAM
ccagucauccuugcucacgc

SEQ ID NO: 2328 - RNA, 20 nt, Artificial Sequence
  targeting sequence with ATCN PAM
auguaauuaaaaauuaaaga

SEQ ID NO: 2329 - RNA, 20 nt, Artificial Sequence
  targeting sequence with ATCN PAM
uuaauuuuuaauuacaugga

SEQ ID NO: 2330 - RNA, 20 nt, Artificial Sequence
  targeting sequence with ATCN PAM
uucuaguauaggcucaguuu

SEQ ID NO: 2331 - RNA, 20 nt, Artificial Sequence
  targeting sequence with ATCN PAM
uuuugcuccaaggcaguaug

SEQ ID NO: 2332 - RNA, 20 nt, Artificial Sequence
  targeting sequence with ATCN PAM
ggcuaucacucguuuaacug

SEQ ID NO: 2333 - RNA, 20 nt, Artificial Sequence
  targeting sequence with ATCN PAM
cucguuuaacugaggucuua

SEQ ID NO: 2334 - RNA, 20 nt, Artificial Sequence
  targeting sequence with ATCN PAM
caaugagugccaagagcgag

SEQ ID NO: 2335 - RNA, 20 nt, Artificial Sequence
  targeting sequence with ATCN PAM
guuguugcugccuuuaacug

SEQ ID NO: 2336 - RNA, 20 nt, Artificial Sequence
  targeting sequence with ATCN PAM
acccagauuuuaagauaauu

SEQ ID NO: 2337 - RNA, 20 nt, Artificial Sequence
  targeting sequence with ATCN PAM
ggguagauuucaguuaaagg

SEQ ID NO: 2338 - RNA, 20 nt, Artificial Sequence
  targeting sequence with ATCN PAM
uaaaaucuggguagauuuca

SEQ ID NO: 2339 - RNA, 20 nt, Artificial Sequence
  targeting sequence with ATCN PAM
auagacuucuaacaguuaag

SEQ ID NO: 2340 - RNA, 20 nt, Artificial Sequence
  targeting sequence with ATCN PAM
guuuuucaaaggcaaaagcu

SEQ ID NO: 2341 - RNA, 20 nt, Artificial Sequence
  targeting sequence with ATCN PAM
ccaacagauccaaaaaauau

SEQ ID NO: 2342 - RNA, 20 nt, Artificial Sequence
  targeting sequence with ATCN PAM
guuggugauuauuuuaauug

SEQ ID NO: 2343 - RNA, 20 nt, Artificial Sequence
  targeting sequence with ATCN PAM
aaaaaauauuaagcaaaaaa

SEQ ID NO: 2344 - RNA, 20 nt, Artificial Sequence
  targeting sequence with ATCN PAM
uuuuuuuuuuuuuuugcuua

SEQ ID NO: 2345 - RNA, 20 nt, Artificial Sequence
  targeting sequence with ATCN PAM
augaacaauauaauucuggu

SEQ ID NO: 2346 - RNA, 20 nt, Artificial Sequence
  targeting sequence with ATCN PAM
guaaaucagguagggaagaa

SEQ ID NO: 2347 - RNA, 20 nt, Artificial Sequence
  targeting sequence with ATCN PAM
gguagggaagaaggacugga

SEQ ID NO: 2348 - RNA, 20 nt, Artificial Sequence
  targeting sequence with ATCN PAM
uccaguccuucuucccuacc

SEQ ID NO: 2349 - RNA, 20 nt, Artificial Sequence
  targeting sequence with ATCN PAM
aaccuuccccuuccagcaga

SEQ ID NO: 2350 - RNA, 20 nt, Artificial Sequence
  targeting sequence with ATCN PAM
ucaauccaaccuuccccuuc

SEQ ID NO: 2351 - RNA, 20 nt, Artificial Sequence
  targeting sequence with ATCN PAM
uggugccuguguggcucauc

SEQ ID NO: 2352 - RNA, 20 nt, Artificial Sequence
  targeting sequence with ATCN PAM
cuuuuguguguuccuggucc

SEQ ID NO: 2353 - RNA, 20 nt, Artificial Sequence
  targeting sequence with ATCN PAM
ccaaucucuuuuguguguuc

SEQ ID NO: 2354 - RNA, 20 nt, Artificial Sequence
  targeting sequence with ATCN PAM
uuucguuaauuguagagggu

SEQ ID NO: 2355 - RNA, 20 nt, Artificial Sequence
  targeting sequence with ATCN PAM
aaaucauuucguuaauugua

SEQ ID NO: 2356 - RNA, 20 nt, Artificial Sequence
  targeting sequence with ATCN PAM
aucaaaaucauuucguuaau

SEQ ID NO: 2357 - RNA, 20 nt, Artificial Sequence
  targeting sequence with ATCN PAM
gggccccagagggagguaaa

SEQ ID NO: 2358 - RNA, 20 nt, Artificial Sequence
  targeting sequence with ATCN PAM
auaagaaaaugugccuccuu

SEQ ID NO: 2359 - RNA, 20 nt, Artificial Sequence
  targeting sequence with ATCN PAM
gcugugugaguacucagugu

SEQ ID NO: 2360 - RNA, 20 nt, Artificial Sequence
  targeting sequence with ATCN PAM
cucacagucuaggggggaua

SEQ ID NO: 2361 - RNA, 20 nt, Artificial Sequence
  targeting sequence with ATCN PAM
ccccuagacugugagggauc

SEQ ID NO: 2362 - RNA, 20 nt, Artificial Sequence
  targeting sequence with ATCN PAM
cuagguauccccccuagacu

SEQ ID NO: 2363 - RNA, 20 nt, Artificial Sequence
  targeting sequence with ATCN PAM
uucaaagagguaaaaauaua

SEQ ID NO: 2364 - RNA, 20 nt, Artificial Sequence
  targeting sequence with ATCN PAM
ucaguggcagcuuucggcag

SEQ ID NO: 2365 - RNA, 20 nt, Artificial Sequence
  targeting sequence with ATCN PAM
acccauauagaaggaguuau

SEQ ID NO: 2366 - RNA, 20 nt, Artificial Sequence
  targeting sequence with ATCN PAM
aaaaagacaaagcuaccuaa

SEQ ID NO: 2367 - RNA, 20 nt, Artificial Sequence
  targeting sequence with ATCN PAM
gaaggaugcucuguguuuuu

SEQ ID NO: 2368 - RNA, 20 nt, Artificial Sequence
  targeting sequence with ATCN PAM
uucugauagagaaaugcuua

SEQ ID NO: 2369 - RNA, 20 nt, Artificial Sequence
  targeting sequence with ATCN PAM
aauggcaggaaacuaaauaa

SEQ ID NO: 2370 - RNA, 20 nt, Artificial Sequence
  targeting sequence with ATCN PAM
uccuaguagcuucugggucu

SEQ ID NO: 2371 - RNA, 20 nt, Artificial Sequence
  targeting sequence with ATCN PAM
auagacaggaugaauacucc

SEQ ID NO: 2372 - RNA, 20 nt, Artificial Sequence
  targeting sequence with ATCN PAM
ugucuauggaugcaaaaacu

SEQ ID NO: 2373 - RNA, 20 nt, Artificial Sequence
  targeting sequence with ATCN PAM
ccguaacaaaccuaugagga

SEQ ID NO: 2374 - RNA, 20 nt, Artificial Sequence
  targeting sequence with ATCN PAM
aacacaguaaguuuaaagca

SEQ ID NO: 2375 - RNA, 20 nt, Artificial Sequence
  targeting sequence with ATCN PAM
ugacaagacccaggaagagu

SEQ ID NO: 2376 - RNA, 20 nt, Artificial Sequence
  targeting sequence with ATCN PAM
aguguccuaacuuaugugug

SEQ ID NO: 2377 - RNA, 20 nt, Artificial Sequence
  targeting sequence with ATCN PAM
uauaggacaauuugugguuu

SEQ ID NO: 2378 - RNA, 20 nt, Artificial Sequence
  targeting sequence with ATCN PAM
aauacagcaaaaccacaaau

SEQ ID NO: 2379 - RNA, 20 nt, Artificial Sequence
  targeting sequence with ATCN PAM
uccaauacagcaaaaccaca

SEQ ID NO: 2380 - RNA, 20 nt, Artificial Sequence
  targeting sequence with ATCN PAM
uacauucaaauauauuucaa

SEQ ID NO: 2381 - RNA, 20 nt, Artificial Sequence
  targeting sequence with ATCN PAM
uugaaauauauuugaaugua

SEQ ID NO: 2382 - RNA, 20 nt, Artificial Sequence
  targeting sequence with ATCN PAM
gcauccccuuuguuuuuaca

SEQ ID NO: 2383 - RNA, 20 nt, Artificial Sequence
  targeting sequence with ATCN PAM
ccuuuguuuuuacaaaguac

SEQ ID NO: 2384 - RNA, 20 nt, Artificial Sequence
  targeting sequence with ATCN PAM
cauuaucucauuauaccugg

SEQ ID NO: 2385 - RNA, 20 nt, Artificial Sequence
  targeting sequence with ATCN PAM
cauuauaccuggggaauuau

SEQ ID NO: 2386 - RNA, 20 nt, Artificial Sequence
  targeting sequence with ATCN PAM
ucagugcaaaaugaaaauac

SEQ ID NO: 2387 - RNA, 20 nt, Artificial Sequence
  targeting sequence with ATCN PAM
gaacggucagguucacgaaa

SEQ ID NO: 2388 - RNA, 20 nt, Artificial Sequence
  targeting sequence with ATCN PAM
ccuuaauuugaaccacuacu

SEQ ID NO: 2389 - RNA, 20 nt, Artificial Sequence
  targeting sequence with ATCN PAM
uaaagaguuguuuuaaaaaa

SEQ ID NO: 2390 - RNA, 20 nt, Artificial Sequence
  targeting sequence with ATCN PAM
uucauuugggagaggugaga

SEQ ID NO: 2391 - RNA, 20 nt, Artificial Sequence
  targeting sequence with ATCN PAM
cuucauucuaagauauguua

SEQ ID NO: 2392 - RNA, 20 nt, Artificial Sequence
  targeting sequence with ATCN PAM
uagaaugaagagauacugaa

SEQ ID NO: 2393 - RNA, 20 nt, Artificial Sequence
  targeting sequence with ATCN PAM
caaaggaauguugguaagcu

SEQ ID NO: 2394 - RNA, 20 nt, Artificial Sequence
  targeting sequence with ATCN PAM
gaaugcaaaacaaguaacgc

SEQ ID NO: 2395 - RNA, 20 nt, Artificial Sequence
  targeting sequence with ATCN PAM
ucacaauacaguggcguuac

SEQ ID NO: 2396 - RNA, 20 nt, Artificial Sequence
  targeting sequence with ATCN PAM
acguaucugucaucagggaa

SEQ ID NO: 2397 - RNA, 20 nt, Artificial Sequence
  targeting sequence with ATCN PAM
gucaucagggaagauaaagu

SEQ ID NO: 2398 - RNA, 20 nt, Artificial Sequence
  targeting sequence with ATCN PAM
gggaagauaaaguggcuguu

SEQ ID NO: 2399 - RNA, 20 nt, Artificial Sequence
  targeting sequence with ATCN PAM
ucccugaugacagauacguc

SEQ ID NO: 2400 - RNA, 20 nt, Artificial Sequence
  targeting sequence with ATCN PAM
cagguuuuaagccagcucaa

SEQ ID NO: 2401 - RNA, 20 nt, Artificial Sequence
  targeting sequence with ATCN PAM
auaaagggacugguuuuaga

SEQ ID NO: 2402 - RNA, 20 nt, Artificial Sequence
  targeting sequence with ATCN PAM
ccagccucagaguuuuuccc

SEQ ID NO: 2403 - RNA, 20 nt, Artificial Sequence
  targeting sequence with ATCN PAM
gcaggucuggcccugccucu

SEQ ID NO: 2404 - RNA, 20 nt, Artificial Sequence
  targeting sequence with ATCN PAM
ugaguucuucauguacuggc

SEQ ID NO: 2405 - RNA, 20 nt, Artificial Sequence
  targeting sequence with ATCN PAM
caaaguaggcagaauaggga

SEQ ID NO: 2406 - RNA, 20 nt, Artificial Sequence
  targeting sequence with ATCN PAM
aaggccccauugucacuagc

SEQ ID NO: 2407 - RNA, 20 nt, Artificial Sequence
  targeting sequence with ATCN PAM
cuuuuccacuucaaacucuu

SEQ ID NO: 2408 - RNA, 20 nt, Artificial Sequence
  targeting sequence with ATCN PAM
acacacagagcacgugaugc

SEQ ID NO: 2409 - RNA, 20 nt, Artificial Sequence
  targeting sequence with ATCN PAM
cgugcucuguguguggauac

SEQ ID NO: 2410 - RNA, 20 nt, Artificial Sequence
  targeting sequence with ATCN PAM
gucucccuuagcaggaaagg

SEQ ID NO: 2411 - RNA, 20 nt, Artificial Sequence
  targeting sequence with ATCN PAM
cugcuccaccaaugcauuag

SEQ ID NO: 2412 - RNA, 20 nt, Artificial Sequence
  targeting sequence with ATCN PAM
cugagcuuuacuccuugccu

SEQ ID NO: 2413 - RNA, 20 nt, Artificial Sequence
  targeting sequence with ATCN PAM
ccauucucaggcaaggagua

SEQ ID NO: 2414 - RNA, 20 nt, Artificial Sequence
  targeting sequence with ATCN PAM
aaauuaagcagcuucauccc

SEQ ID NO: 2415 - RNA, 20 nt, Artificial Sequence
  targeting sequence with ATCN PAM
aaaguauaccacaauaaagu

SEQ ID NO: 2416 - RNA, 20 nt, Artificial Sequence
  targeting sequence with ATCN PAM
aguacauaauaaguacucca

SEQ ID NO: 2417 - RNA, 20 nt, Artificial Sequence
  targeting sequence with ATCN PAM
aucaaauaaaagaaauacga

SEQ ID NO: 2418 - RNA, 20 nt, Artificial Sequence
  targeting sequence with ATCN PAM
aauaaaagaaauacgaugga

SEQ ID NO: 2419 - RNA, 20 nt, Artificial Sequence
  targeting sequence with ATCN PAM
uauuucuuuuauuugauaga

SEQ ID NO: 2420 - RNA, 20 nt, Artificial Sequence
  targeting sequence with ATCN PAM
aucguauuucuuuuauuuga

SEQ ID NO: 2421 - RNA, 20 nt, Artificial Sequence
  targeting sequence with ATCN PAM
gcccaccucggcuuaccgag

SEQ ID NO: 2422 - RNA, 20 nt, Artificial Sequence
  targeting sequence with ATCN PAM
cuugagcccaggaguuugag

SEQ ID NO: 2423 - RNA, 20 nt, Artificial Sequence
  targeting sequence with ATCN PAM
uguuucuauacaaaauacaa

SEQ ID NO: 2424 - RNA, 20 nt, Artificial Sequence
  targeting sequence with ATCN PAM
ucccuccucagcccccuggu

SEQ ID NO: 2425 - RNA, 20 nt, Artificial Sequence
  targeting sequence with ATCN PAM
cugaaacccagaaggucuag

SEQ ID NO: 2426 - RNA, 20 nt, Artificial Sequence
  targeting sequence with ATCN PAM
ggggucacugcagccuagac

SEQ ID NO: 2427 - RNA, 20 nt, Artificial Sequence
  targeting sequence with ATCN PAM
gggugacagcaaaccuggug

SEQ ID NO: 2428 - RNA, 20 nt, Artificial Sequence
  targeting sequence with ATCN PAM
gcacuaucauucaguuuaua

SEQ ID NO: 2429 - RNA, 20 nt, Artificial Sequence
  targeting sequence with ATCN PAM
uucaguuuauaacagcacaa

SEQ ID NO: 2430 - RNA, 20 nt, Artificial Sequence
  targeting sequence with ATCN PAM
aaaugcaaaguugugcuguu

SEQ ID NO: 2431 - RNA, 20 nt, Artificial Sequence
  targeting sequence with ATCN PAM
gacuuaaaagaaccaccacc

SEQ ID NO: 2432 - RNA, 20 nt, Artificial Sequence
  targeting sequence with ATCN PAM
accuuucccucuuaugacuu

SEQ ID NO: 2433 - RNA, 20 nt, Artificial Sequence
  targeting sequence with ATCN PAM
uuacaacuucuucauacaau

SEQ ID NO: 2434 - RNA, 20 nt, Artificial Sequence
  targeting sequence with ATCN PAM
ccuacaaaaagaaacacagc

SEQ ID NO: 2435 - RNA, 20 nt, Artificial Sequence
  targeting sequence with ATCN PAM
cuaguggaauagcuaugguu

SEQ ID NO: 2436 - RNA, 20 nt, Artificial Sequence
  targeting sequence with ATCN PAM
gguaaggacuacuuuuauau

SEQ ID NO: 2437 - RNA, 20 nt, Artificial Sequence
  targeting sequence with ATCN PAM
gcuuccuccuaggggccagu

SEQ ID NO: 2438 - RNA, 20 nt, Artificial Sequence
  targeting sequence with ATCN PAM
ugugccgcagagcugaaugc

SEQ ID NO: 2439 - RNA, 20 nt, Artificial Sequence
  targeting sequence with ATCN PAM
ucuucugaggcauucagcuc

SEQ ID NO: 2440 - RNA, 20 nt, Artificial Sequence
  targeting sequence with ATCN PAM
ccagcccuaauuccuugcug

SEQ ID NO: 2441 - RNA, 20 nt, Artificial Sequence
  targeting sequence with ATCN PAM
ugugacagcaaggaauuagg

SEQ ID NO: 2442 - RNA, 20 nt, Artificial Sequence
  targeting sequence with ATCN PAM
agacaaaaauugguuuuaaa

SEQ ID NO: 2443 - RNA, 20 nt, Artificial Sequence
  targeting sequence with ATCN PAM
aauuaaaaaaacuccugagc

SEQ ID NO: 2444 - RNA, 20 nt, Artificial Sequence
  targeting sequence with ATCN PAM
augaguaacuauacccaccu

SEQ ID NO: 2445 - RNA, 20 nt, Artificial Sequence
  targeting sequence with ATCN PAM
gaauucuuacaaguaauaua

SEQ ID NO: 2446 - RNA, 20 nt, Artificial Sequence
  targeting sequence with ATCN PAM
ugugaauuauauuacuugua

SEQ ID NO: 2447 - RNA, 20 nt, Artificial Sequence
  targeting sequence with ATCN PAM
uaaaaaacauaccauauaga

SEQ ID NO: 2448 - RNA, 20 nt, Artificial Sequence
  targeting sequence with ATCN PAM
agucuaaaaauuuuuuagag

SEQ ID NO: 2449 - RNA, 20 nt, Artificial Sequence
  targeting sequence with ATCN PAM
ucuguauuaggaaaagauau

SEQ ID NO: 2450 - RNA, 20 nt, Artificial Sequence
  targeting sequence with ATCN PAM
uuuccuaauacagaagauuu

SEQ ID NO: 2451 - RNA, 20 nt, Artificial Sequence
  targeting sequence with ATCN PAM
guuacuggagguacuacuug

SEQ ID NO: 2452 - RNA, 20 nt, Artificial Sequence
  targeting sequence with ATCN PAM
uuccucuaaccaguuaaaaa

SEQ ID NO: 2453 - RNA, 20 nt, Artificial Sequence
  targeting sequence with ATCN PAM
uguuauaaaugucugucuua

SEQ ID NO: 2454 - RNA, 20 nt, Artificial Sequence
  targeting sequence with ATCN PAM
gacuuuccuuuuguucuuau

SEQ ID NO: 2455 - RNA, 20 nt, Artificial Sequence
  targeting sequence with ATCN PAM
agucucagauucagauggac

SEQ ID NO: 2456 - RNA, 20 nt, Artificial Sequence
  targeting sequence with ATCN PAM
gagacuggauuguaucagac

SEQ ID NO: 2457 - RNA, 20 nt, Artificial Sequence
  targeting sequence with ATCN PAM
gaaucugagacuggauugua

SEQ ID NO: 2458 - RNA, 20 nt, Artificial Sequence
  targeting sequence with ATCN PAM
auuuuaccuuccagagaaag

SEQ ID NO: 2459 - RNA, 20 nt, Artificial Sequence
  targeting sequence with ATCN PAM
uucucuggaagguaaaaugg

SEQ ID NO: 2460 - RNA, 20 nt, Artificial Sequence
  targeting sequence with ATCN PAM
aggaacugaaacuaagcuuu

SEQ ID NO: 2461 - RNA, 20 nt, Artificial Sequence
  targeting sequence with ATCN PAM
auucuaccgcugagucacau

SEQ ID NO: 2462 - RNA, 20 nt, Artificial Sequence
  targeting sequence with ATCN PAM
cucugucucuuaaaaaaagg

SEQ ID NO: 2463 - RNA, 20 nt, Artificial Sequence
  targeting sequence with ATCN PAM
cucccuccacuacguuacuu

SEQ ID NO: 2464 - RNA, 20 nt, Artificial Sequence
  targeting sequence with ATCN PAM
cagaugcaaagaauaaaaaa

SEQ ID NO: 2465 - RNA, 20 nt, Artificial Sequence
  targeting sequence with ATCN PAM
gugauuaugugaagaaguaa

SEQ ID NO: 2466 - RNA, 20 nt, Artificial Sequence
  targeting sequence with ATCN PAM
gcuugguuuccagccccuau

SEQ ID NO: 2467 - RNA, 20 nt, Artificial Sequence
  targeting sequence with ATCN PAM
auuugcuccaucggcuuggu

SEQ ID NO: 2468 - RNA, 20 nt, Artificial Sequence
  targeting sequence with ATCN PAM
ccguugucauucugucaggc

SEQ ID NO: 2469 - RNA, 20 nt, Artificial Sequence
  targeting sequence with ATCN PAM
acucagccgugaacuuacuu

SEQ ID NO: 2470 - RNA, 20 nt, Artificial Sequence
  targeting sequence with ATCN PAM
gugaucuagauuuaagacca

SEQ ID NO: 2471 - RNA, 20 nt, Artificial Sequence
  targeting sequence with ATCN PAM
cagaugaauuucuagggacu

SEQ ID NO: 2472 - RNA, 20 nt, Artificial Sequence
  targeting sequence with ATCN PAM
agauuuaagaccaggcuuac

SEQ ID NO: 2473 - RNA, 20 nt, Artificial Sequence
  targeting sequence with ATCN PAM
agaucacagaugaauuucua

SEQ ID NO: 2474 - RNA, 20 nt, Artificial Sequence
  targeting sequence with ATCN PAM
ucagaggaaacgaacuaaug

SEQ ID NO: 2475 - RNA, 20 nt, Artificial Sequence
  targeting sequence with ATCN PAM
auccugucacacccauuaua

SEQ ID NO: 2476 - RNA, 20 nt, Artificial Sequence
  targeting sequence with ATCN PAM
ugucacacccauuauaaaua

SEQ ID NO: 2477 - RNA, 20 nt, Artificial Sequence
  targeting sequence with ATCN PAM
uguaaaguacuuugaaaaug

SEQ ID NO: 2478 - RNA, 20 nt, Artificial Sequence
  targeting sequence with ATCN PAM
aucagcugggcaucagacag

SEQ ID NO: 2479 - RNA, 20 nt, Artificial Sequence
  targeting sequence with ATCN PAM
gcugggcaucagacagaauu

SEQ ID NO: 2480 - RNA, 20 nt, Artificial Sequence
  targeting sequence with ATCN PAM
gacagaauucacugagcaaa

SEQ ID NO: 2481 - RNA, 20 nt, Artificial Sequence
  targeting sequence with ATCN PAM
cuagggaggcugcacuaacu

SEQ ID NO: 2482 - RNA, 20 nt, Artificial Sequence
  targeting sequence with ATCN PAM
uuuguuuggguugguacaug

SEQ ID NO: 2483 - RNA, 20 nt, Artificial Sequence
  targeting sequence with ATCN PAM
gcauuugaagcaguaauucc

SEQ ID NO: 2484 - RNA, 20 nt, Artificial Sequence
  targeting sequence with ATCN PAM
guauuuaguucauugaggca

SEQ ID NO: 2485 - RNA, 20 nt, Artificial Sequence
  targeting sequence with ATCN PAM
ugggaaguaacugcuguacc

SEQ ID NO: 2486 - RNA, 20 nt, Artificial Sequence
  targeting sequence with ATCN PAM
aggggcguuaaguccuuaca

SEQ ID NO: 2487 - RNA, 20 nt, Artificial Sequence
  targeting sequence with ATCN PAM
caacgcagaccaaagcaggc

SEQ ID NO: 2488 - RNA, 20 nt, Artificial Sequence
  targeting sequence with ATCN PAM
caaacaccaggguaggccag

SEQ ID NO: 2489 - RNA, 20 nt, Artificial Sequence
  targeting sequence with ATCN PAM
ugauaaaacaaggcacuguc

SEQ ID NO: 2490 - RNA, 20 nt, Artificial Sequence
  targeting sequence with ATCN PAM
ggauaaggucggucucauuu

SEQ ID NO: 2491 - RNA, 20 nt, Artificial Sequence
  targeting sequence with ATCN PAM
ugaaagaaagagaaaggugg

SEQ ID NO: 2492 - RNA, 20 nt, Artificial Sequence
  targeting sequence with ATCN PAM
ugcuuuuucacaccaccuuu

SEQ ID NO: 2493 - RNA, 20 nt, Artificial Sequence
  targeting sequence with ATCN PAM
gaagguaaaguucaucucua

SEQ ID NO: 2494 - RNA, 20 nt, Artificial Sequence
  targeting sequence with ATCN PAM
uuucacaauaaauuuucagc

SEQ ID NO: 2495 - RNA, 20 nt, Artificial Sequence
  targeting sequence with ATCN PAM
aaagaauucagacuacuaac

SEQ ID NO: 2496 - RNA, 20 nt, Artificial Sequence
  targeting sequence with ATCN PAM
aucuguaagcaauauuuacu

SEQ ID NO: 2497 - RNA, 20 nt, Artificial Sequence
  targeting sequence with ATCN PAM
guaagcaauauuuacuauga

SEQ ID NO: 2498 - RNA, 20 nt, Artificial Sequence
  targeting sequence with ATCN PAM
uaaaaauuauaaagaaauaa

SEQ ID NO: 2499 - RNA, 20 nt, Artificial Sequence
  targeting sequence with ATCN PAM
uagcaauugauagugaugag

SEQ ID NO: 2500 - RNA, 20 nt, Artificial Sequence
  targeting sequence with ATCN PAM
auugcuaugauuucguguuu

SEQ ID NO: 2501 - RNA, 20 nt, Artificial Sequence
  targeting sequence with ATCN PAM
cuaucaauugcuaugauuuc

SEQ ID NO: 2502 - RNA, 20 nt, Artificial Sequence
  targeting sequence with ATCN PAM
cucaucacuaucaauugcua

SEQ ID NO: 2503 - RNA, 20 nt, Artificial Sequence
  targeting sequence with ATCN PAM
ggaagaauguagaaguaauu

SEQ ID NO: 2504 - RNA, 20 nt, Artificial Sequence
  targeting sequence with ATCN PAM
cagugaauuacuucuacauu

SEQ ID NO: 2505 - RNA, 20 nt, Artificial Sequence
  targeting sequence with ATCN PAM
cauuaccucucugguuaaaa

SEQ ID NO: 2506 - RNA, 20 nt, Artificial Sequence
  targeting sequence with ATCN PAM
aauuuguuugaaaaagaaca

SEQ ID NO: 2507 - RNA, 20 nt, Artificial Sequence
  targeting sequence with ATCN PAM
auuucauucagcaacagacc

SEQ ID NO: 2508 - RNA, 20 nt, Artificial Sequence
  targeting sequence with ATCN PAM
gcacuuuucccucuaaucua

SEQ ID NO: 2509 - RNA, 20 nt, Artificial Sequence
  targeting sequence with ATCN PAM
aguaggcaaauaaauguuug

SEQ ID NO: 2510 - RNA, 20 nt, Artificial Sequence
  targeting sequence with ATCN PAM
caggcaaguauucagugacc

SEQ ID NO: 2511 - RNA, 20 nt, Artificial Sequence
  targeting sequence with ATCN PAM
ucucaggcaaguauucagug

SEQ ID NO: 2512 - RNA, 20 nt, Artificial Sequence
  targeting sequence with ATCN PAM
cuggaagagacacaaauuuc

SEQ ID NO: 2513 - RNA, 20 nt, Artificial Sequence
  targeting sequence with ATCN PAM
auucucguccuucagaacua

SEQ ID NO: 2514 - RNA, 20 nt, Artificial Sequence
  targeting sequence with ATCN PAM
aaacuuuuugaaagcaaugc

SEQ ID NO: 2515 - RNA, 20 nt, Artificial Sequence
  targeting sequence with ATCN PAM
auucuucaguaucaacccuu

SEQ ID NO: 2516 - RNA, 20 nt, Artificial Sequence
  targeting sequence with ATCN PAM
acccuuuaaaaaaaagcaga

SEQ ID NO: 2517 - RNA, 20 nt, Artificial Sequence
  targeting sequence with ATCN PAM
gcuuuuuuuuaaaggguuga

SEQ ID NO: 2518 - RNA, 20 nt, Artificial Sequence
  targeting sequence with ATCN PAM
uaugccaggauaggcauagu

SEQ ID NO: 2519 - RNA, 20 nt, Artificial Sequence
  targeting sequence with ATCN PAM
uggcauaggauuggucacuu

SEQ ID NO: 2520 - RNA, 20 nt, Artificial Sequence
  targeting sequence with ATCN PAM
uaugccagacauuaaaagaa

SEQ ID NO: 2521 - RNA, 20 nt, Artificial Sequence
  targeting sequence with ATCN PAM
cuuucuuuuaaugucuggca

SEQ ID NO: 2522 - RNA, 20 nt, Artificial Sequence
  targeting sequence with ATCN PAM
gaaaaagaaaaaauaaugua

SEQ ID NO: 2523 - RNA, 20 nt, Artificial Sequence
  targeting sequence with ATCN PAM
ucagcaccugguaaggugcc

SEQ ID NO: 2524 - RNA, 20 nt, Artificial Sequence
  targeting sequence with ATCN PAM
guuuuuaucuucagcaccug

SEQ ID NO: 2525 - RNA, 20 nt, Artificial Sequence
  targeting sequence with ATCN PAM
uugguuuuaugguuuuuuug

SEQ ID NO: 2526 - RNA, 20 nt, Artificial Sequence
  targeting sequence with ATCN PAM
uauucaucauugguuuuaug

SEQ ID NO: 2527 - RNA, 20 nt, Artificial Sequence
  targeting sequence with ATCN PAM
ccuuaucuggauaugauuuu

SEQ ID NO: 2528 - RNA, 20 nt, Artificial Sequence
  targeting sequence with ATCN PAM
ggauaugauuuugcccaauu

SEQ ID NO: 2529 - RNA, 20 nt, Artificial Sequence
  targeting sequence with ATCN PAM
agauaaggagauuagaguag

SEQ ID NO: 2530 - RNA, 20 nt, Artificial Sequence
  targeting sequence with ATCN PAM
uauccagauaaggagauuag

SEQ ID NO: 2531 - RNA, 20 nt, Artificial Sequence
  targeting sequence with ATCN PAM
ucgaauugggcaaaaucaua

SEQ ID NO: 2532 - RNA, 20 nt, Artificial Sequence
  targeting sequence with ATCN PAM
guugugacagagggcacugg

SEQ ID NO: 2533 - RNA, 20 nt, Artificial Sequence
  targeting sequence with ATCN PAM
aaacauaucacuucucaccu

SEQ ID NO: 2534 - RNA, 20 nt, Artificial Sequence
  targeting sequence with ATCN PAM
cuucucaccugaguuucuuc

SEQ ID NO: 2535 - RNA, 20 nt, Artificial Sequence
  targeting sequence with ATCN PAM
acggacaaagaagaaacuca

SEQ ID NO: 2536 - RNA, 20 nt, Artificial Sequence
  targeting sequence with ATCN PAM
uugcauggcaaaggugagcu

SEQ ID NO: 2537 - RNA, 20 nt, Artificial Sequence
  targeting sequence with ATCN PAM
auauuauccuugcauggcaa

SEQ ID NO: 2538 - RNA, 20 nt, Artificial Sequence
  targeting sequence with ATCN PAM
ucuuucauguuucccucucu

SEQ ID NO: 2539 - RNA, 20 nt, Artificial Sequence
  targeting sequence with ATCN PAM
auaaaacuucugugaaaaau

SEQ ID NO: 2540 - RNA, 20 nt, Artificial Sequence
  targeting sequence with ATCN PAM
uaauuuaguucguaacugug

SEQ ID NO: 2541 - RNA, 20 nt, Artificial Sequence
  targeting sequence with ATCN PAM
uauucauauauugugugugu

SEQ ID NO: 2542 - RNA, 20 nt, Artificial Sequence
  targeting sequence with ATCN PAM
uguguguauaucauauucau

SEQ ID NO: 2543 - RNA, 20 nt, Artificial Sequence
  targeting sequence with ATCN PAM
ucucaaaacaguuguuagac

SEQ ID NO: 2544 - RNA, 20 nt, Artificial Sequence
  targeting sequence with ATCN PAM
ugcggucuaacaacuguuuu

SEQ ID NO: 2545 - RNA, 20 nt, Artificial Sequence
  targeting sequence with ATCN PAM
uuagucuugugauauuuuau

SEQ ID NO: 2546 - RNA, 20 nt, Artificial Sequence
  targeting sequence with ATCN PAM
caagacuaaagauuaacuuu

SEQ ID NO: 2547 - RNA, 20 nt, Artificial Sequence
  targeting sequence with ATCN PAM
ccacaaagaccaauauccau

SEQ ID NO: 2548 - RNA, 20 nt, Artificial Sequence
  targeting sequence with ATCN PAM
auugacaugagcucacaguu

SEQ ID NO: 2549 - RNA, 20 nt, Artificial Sequence
  targeting sequence with ATCN PAM
aguuaguuacuuacagcauu

SEQ ID NO: 2550 - RNA, 20 nt, Artificial Sequence
  targeting sequence with ATCN PAM
cuacuguauacaucucuauu

SEQ ID NO: 2551 - RNA, 20 nt, Artificial Sequence
  targeting sequence with ATCN PAM
cuauucuucauaaacuugag

SEQ ID NO: 2552 - RNA, 20 nt, Artificial Sequence
  targeting sequence with ATCN PAM
cucaccaucuacaaaagaag

SEQ ID NO: 2553 - RNA, 20 nt, Artificial Sequence
  targeting sequence with ATCN PAM
acaaaagaagauuaauaauu

SEQ ID NO: 2554 - RNA, 20 nt, Artificial Sequence
  targeting sequence with ATCN PAM
ucuuuuguagauggugagag

SEQ ID NO: 2555 - RNA, 20 nt, Artificial Sequence
  targeting sequence with ATCN PAM
uuagaaauguccuucacaua

SEQ ID NO: 2556 - RNA, 20 nt, Artificial Sequence
  targeting sequence with ATCN PAM
uauaugucaaaggaagguuu

SEQ ID NO: 2557 - RNA, 20 nt, Artificial Sequence
  targeting sequence with ATCN PAM
aaauucagaacugucuacuc

SEQ ID NO: 2558 - RNA, 20 nt, Artificial Sequence
  targeting sequence with ATCN PAM
uuguccugugacacuggcac

SEQ ID NO: 2559 - RNA, 20 nt, Artificial Sequence
  targeting sequence with ATCN PAM
aaaaaaugagaauaaaaccu

SEQ ID NO: 2560 - RNA, 20 nt, Artificial Sequence
  targeting sequence with ATCN PAM
gguuuuauucucauuuuuug

SEQ ID NO: 2561 - RNA, 20 nt, Artificial Sequence
  targeting sequence with ATCN PAM
uuuacaaauuaaagaugugc

SEQ ID NO: 2562 - RNA, 20 nt, Artificial Sequence
  targeting sequence with ATCN PAM
acguggacaucaaaauguau

SEQ ID NO: 2563 - RNA, 20 nt, Artificial Sequence
  targeting sequence with ATCN PAM
ccucggccccauaggccgaa

SEQ ID NO: 2564 - RNA, 20 nt, Artificial Sequence
  targeting sequence with ATCN PAM
ucaccagaaauuucaccuca

SEQ ID NO: 2565 - RNA, 20 nt, Artificial Sequence
  targeting sequence with ATCN PAM
cuuaggucagcuccaucuuc

SEQ ID NO: 2566 - RNA, 20 nt, Artificial Sequence
  targeting sequence with ATCN PAM
gaaaacucugucuaguauaa

SEQ ID NO: 2567 - RNA, 20 nt, Artificial Sequence
  targeting sequence with ATCN PAM
aaacauaaaacuguaccaca

SEQ ID NO: 2568 - RNA, 20 nt, Artificial Sequence
  targeting sequence with ATCN PAM
uaauguaacaauuaagaaau

SEQ ID NO: 2569 - RNA, 20 nt, Artificial Sequence
  targeting sequence with ATCN PAM
guucucccaacuaauuagaa

SEQ ID NO: 2570 - RNA, 20 nt, Artificial Sequence
  targeting sequence with ATCN PAM
ucuauaaugucaaucaguuc

SEQ ID NO: 2571 - RNA, 20 nt, Artificial Sequence
  targeting sequence with ATCN PAM
cauaugccacuuaaguaaaa

SEQ ID NO: 2572 - RNA, 20 nt, Artificial Sequence
  targeting sequence with ATCN PAM
cacaauaauaugaaggaaga

SEQ ID NO: 2573 - RNA, 20 nt, Artificial Sequence
  targeting sequence with ATCN PAM
uucccagccauuaaaaaagc

SEQ ID NO: 2574 - RNA, 20 nt, Artificial Sequence
  targeting sequence with ATCN PAM
uagagccacacacucaaagu

SEQ ID NO: 2575 - RNA, 20 nt, Artificial Sequence
  targeting sequence with ATCN PAM
cacagcaaauuacauggaag

SEQ ID NO: 2576 - RNA, 20 nt, Artificial Sequence
  targeting sequence with ATCN PAM
cucucuguaagugucucuuc

SEQ ID NO: 2577 - RNA, 20 nt, Artificial Sequence
  targeting sequence with ATCN PAM
ucagcuuccugccguacaac

SEQ ID NO: 2578 - RNA, 20 nt, Artificial Sequence
  targeting sequence with ATCN PAM
gaacuccccaguauuaccaa

SEQ ID NO: 2579 - RNA, 20 nt, Artificial Sequence
  targeting sequence with ATCN PAM
gacacccuuugguagaaaag

SEQ ID NO: 2580 - RNA, 20 nt, Artificial Sequence
  targeting sequence with ATCN PAM
ucggcgcacaucaguguaug

SEQ ID NO: 2581 - RNA, 20 nt, Artificial Sequence
  targeting sequence with ATCN PAM
guguauggguuugcuuuaua

SEQ ID NO: 2582 - RNA, 20 nt, Artificial Sequence
  targeting sequence with ATCN PAM
guaaauaaaaguuuuucuug

SEQ ID NO: 2583 - RNA, 20 nt, Artificial Sequence
  targeting sequence with ATCN PAM
aaaacaaagggcccauuauu

SEQ ID NO: 2584 - RNA, 20 nt, Artificial Sequence
  targeting sequence with ATCN PAM
ugacuuccaugcuaagcagu

SEQ ID NO: 2585 - RNA, 20 nt, Artificial Sequence
  targeting sequence with ATCN PAM
agcuaggcccacaacugaag

SEQ ID NO: 2586 - RNA, 20 nt, Artificial Sequence
  targeting sequence with ATCN PAM
cucacuuggaagugauauag

SEQ ID NO: 2587 - RNA, 20 nt, Artificial Sequence
  targeting sequence with ATCN PAM
cuuccaagugagagauccag

SEQ ID NO: 2588 - RNA, 20 nt, Artificial Sequence
  targeting sequence with ATCN PAM
gaaaauuuuaauggauaacu

SEQ ID NO: 2589 - RNA, 20 nt, Artificial Sequence
  targeting sequence with ATCN PAM
auuaaaauuuucagauuucc

SEQ ID NO: 2590 - RNA, 20 nt, Artificial Sequence
  targeting sequence with ATCN PAM
gagagaaaguaaugaauacu

SEQ ID NO: 2591 - RNA, 20 nt, Artificial Sequence
  targeting sequence with ATCN PAM
auuuguaaauacuuacuuug

SEQ ID NO: 2592 - RNA, 20 nt, Artificial Sequence
  targeting sequence with ATCN PAM
aaguaaguauuuacaaaugg

SEQ ID NO: 2593 - RNA, 20 nt, Artificial Sequence
  targeting sequence with ATCN PAM
uaaacuuuuggucuauauuc

SEQ ID NO: 2594 - RNA, 20 nt, Artificial Sequence
  targeting sequence with ATCN PAM
cuggguucuagagggugugg

SEQ ID NO: 2595 - RNA, 20 nt, Artificial Sequence
  targeting sequence with ATCN PAM
gacaaacauuauaagguuaa

SEQ ID NO: 2596 - RNA, 20 nt, Artificial Sequence
  targeting sequence with ATCN PAM
accuccucauccuuagcauu

SEQ ID NO: 2597 - RNA, 20 nt, Artificial Sequence
  targeting sequence with ATCN PAM
uuagcauugaucucaaugua

SEQ ID NO: 2598 - RNA, 20 nt, Artificial Sequence
  targeting sequence with ATCN PAM
uacacagugggcaggcacac

SEQ ID NO: 2599 - RNA, 20 nt, Artificial Sequence
  targeting sequence with ATCN PAM
ccacgaaaaaagguugcccu

SEQ ID NO: 2600 - RNA, 20 nt, Artificial Sequence
  targeting sequence with ATCN PAM
uccaccgcccugauccacac

SEQ ID NO: 2601 - RNA, 20 nt, Artificial Sequence
  targeting sequence with ATCN PAM
gggcgguggaggauccccac

SEQ ID NO: 2602 - RNA, 20 nt, Artificial Sequence
  targeting sequence with ATCN PAM
acacuucgcccauuuucccc

SEQ ID NO: 2603 - RNA, 20 nt, Artificial Sequence
  targeting sequence with ATCN PAM
uggcgagccauuccugaaac

SEQ ID NO: 2604 - RNA, 20 nt, Artificial Sequence
  targeting sequence with ATCN PAM
agggaaacuauguagaagca

SEQ ID NO: 2605 - RNA, 20 nt, Artificial Sequence
  targeting sequence with ATCN PAM
acguuaauauggucuuuuug

SEQ ID NO: 2606 - RNA, 20 nt, Artificial Sequence
  targeting sequence with ATCN PAM
uauuuaauggagcguccgcu

SEQ ID NO: 2607 - RNA, 20 nt, Artificial Sequence
  targeting sequence with ATCN PAM
cauuaggugaauuaccaaga

SEQ ID NO: 2608 - RNA, 20 nt, Artificial Sequence
  targeting sequence with ATCN PAM
uuaccuagcgucuugguaau

SEQ ID NO: 2609 - RNA, 20 nt, Artificial Sequence
  targeting sequence with ATCN PAM
gaaugaucuccauggagaaa

SEQ ID NO: 2610 - RNA, 20 nt, Artificial Sequence
  targeting sequence with ATCN PAM
uucagauuugcucuuuuucc

SEQ ID NO: 2611 - RNA, 20 nt, Artificial Sequence
  targeting sequence with ATCN PAM
ccauggagaaaauaaaacag

SEQ ID NO: 2612 - RNA, 20 nt, Artificial Sequence
  targeting sequence with ATCN PAM
uguuuuuuaaaaagggcaaa

SEQ ID NO: 2613 - RNA, 20 nt, Artificial Sequence
  targeting sequence with ATCN PAM
aggagugacuucuugucaga

SEQ ID NO: 2614 - RNA, 20 nt, Artificial Sequence
  targeting sequence with ATCN PAM
gauuaggaaauaacagaaaa

SEQ ID NO: 2615 - RNA, 20 nt, Artificial Sequence
  targeting sequence with ATCN PAM
gauaugagcgugaagaagcu

SEQ ID NO: 2616 - RNA, 20 nt, Artificial Sequence
  targeting sequence with ATCN PAM
acaauggaauuuaaaacucu

SEQ ID NO: 2617 - RNA, 20 nt, Artificial Sequence
  targeting sequence with ATCN PAM
auaaguauuuagugacuuaa

SEQ ID NO: 2618 - RNA, 20 nt, Artificial Sequence
  targeting sequence with ATCN PAM
guugacagggagagaguucu

SEQ ID NO: 2619 - RNA, 20 nt, Artificial Sequence
  targeting sequence with ATCN PAM
cuucaaaaggaugaucauuu

SEQ ID NO: 2620 - RNA, 20 nt, Artificial Sequence
  targeting sequence with ATCN PAM
uuuugaagugauuuguuuag

SEQ ID NO: 2621 - RNA, 20 nt, Artificial Sequence
  targeting sequence with ATCN PAM
uccuuuugaagugauuuguu

SEQ ID NO: 2622 - RNA, 20 nt, Artificial Sequence
  targeting sequence with ATCN PAM
uuuuuccugugucggugaua

SEQ ID NO: 2623 - RNA, 20 nt, Artificial Sequence
  targeting sequence with ATCN PAM
ccgacacaggaaaaaugauc

SEQ ID NO: 2624 - RNA, 20 nt, Artificial Sequence
  targeting sequence with ATCN PAM
ucacucaccugugaggacag

SEQ ID NO: 2625 - RNA, 20 nt, Artificial Sequence
  targeting sequence with ATCN PAM
guaaagacuguccucacagg

SEQ ID NO: 2626 - RNA, 20 nt, Artificial Sequence
  targeting sequence with ATCN PAM
ucugaucagaguagaugccc

SEQ ID NO: 2627 - RNA, 20 nt, Artificial Sequence
  targeting sequence with ATCN PAM
gaagaucuguaaagacuguc

SEQ ID NO: 2628 - RNA, 20 nt, Artificial Sequence
  targeting sequence with ATCN PAM
gaguagaugcccugaaaugu

SEQ ID NO: 2629 - RNA, 20 nt, Artificial Sequence
  targeting sequence with ATCN PAM
acucugaucagaagaucugu

SEQ ID NO: 2630 - RNA, 20 nt, Artificial Sequence
  targeting sequence with ATCN PAM
cuuaaaacuguaacuuuuca

SEQ ID NO: 2631 - RNA, 20 nt, Artificial Sequence
  targeting sequence with ATCN PAM
gcuguggugaauggaggcua

SEQ ID NO: 2632 - RNA, 20 nt, Artificial Sequence
  targeting sequence with ATCN PAM
caggugugcaccaccacgcc

SEQ ID NO: 2633 - RNA, 20 nt, Artificial Sequence
  targeting sequence with ATCN PAM
cagcuacucgggaggcugag

SEQ ID NO: 2634 - RNA, 20 nt, Artificial Sequence
  targeting sequence with ATCN PAM
cuuguaccuggaagguagag

SEQ ID NO: 2635 - RNA, 20 nt, Artificial Sequence
  targeting sequence with ATCN PAM
aucugaucaaugagacuagu

SEQ ID NO: 2636 - RNA, 20 nt, Artificial Sequence
  targeting sequence with ATCN PAM
gaucaaugagacuaguaaag

SEQ ID NO: 2637 - RNA, 20 nt, Artificial Sequence
  targeting sequence with ATCN PAM
gauggaugaauaccucaagg

SEQ ID NO: 2638 - RNA, 20 nt, Artificial Sequence
  targeting sequence with ATCN PAM
augagacuaguaaagaauuc

SEQ ID NO: 2639 - RNA, 20 nt, Artificial Sequence
  targeting sequence with ATCN PAM
ugcuguucucucacauaaag

SEQ ID NO: 2640 - RNA, 20 nt, Artificial Sequence
  targeting sequence with ATCN PAM
ugaaaaucuauauaacaaaa

SEQ ID NO: 2641 - RNA, 20 nt, Artificial Sequence
  targeting sequence with ATCN PAM
auauaacaaaaauuaaaugu

SEQ ID NO: 2642 - RNA, 20 nt, Artificial Sequence
  targeting sequence with ATCN PAM
gguucacuauuaggaugugg

SEQ ID NO: 2643 - RNA, 20 nt, Artificial Sequence
  targeting sequence with ATCN PAM
uaauagugaaccugauuuuu

SEQ ID NO: 2644 - RNA, 20 nt, Artificial Sequence
  targeting sequence with ATCN PAM
gcacagggucaggggaauga

SEQ ID NO: 2645 - RNA, 20 nt, Artificial Sequence
  targeting sequence with ATCN PAM
uuccccugacccugugccga

SEQ ID NO: 2646 - RNA, 20 nt, Artificial Sequence
  targeting sequence with ATCN PAM
uuaaaaauauucaaaauaau

SEQ ID NO: 2647 - RNA, 20 nt, Artificial Sequence
  targeting sequence with ATCN PAM
uaauuauuuugaauauuuuu

SEQ ID NO: 2648 - RNA, 20 nt, Artificial Sequence
  targeting sequence with ATCN PAM
uuaaaucucaagaguuacug

SEQ ID NO: 2649 - RNA, 20 nt, Artificial Sequence
  targeting sequence with ATCN PAM
caagaguuacugggugaaau

SEQ ID NO: 2650 - RNA, 20 nt, Artificial Sequence
  targeting sequence with ATCN PAM
ucuggauugucugugucauc

SEQ ID NO: 2651 - RNA, 20 nt, Artificial Sequence
  targeting sequence with ATCN PAM
ggauugucugugucaucauc

SEQ ID NO: 2652 - RNA, 20 nt, Artificial Sequence
  targeting sequence with ATCN PAM
agaugauagcguguuuuacc

SEQ ID NO: 2653 - RNA, 20 nt, Artificial Sequence
  targeting sequence with ATCN PAM
uccacugaaaguaaugacug

SEQ ID NO: 2654 - RNA, 20 nt, Artificial Sequence
  targeting sequence with ATCN PAM
acugaaaguaaugacugcac

SEQ ID NO: 2655 - RNA, 20 nt, Artificial Sequence
  targeting sequence with ATCN PAM
agcuugaaauauuuaaaaug

SEQ ID NO: 2656 - RNA, 20 nt, Artificial Sequence
  targeting sequence with ATCN PAM
cauuaggucaaguccaucug

SEQ ID NO: 2657 - RNA, 20 nt, Artificial Sequence
  targeting sequence with ATCN PAM
guaauacaggcagcuuauua

SEQ ID NO: 2658 - RNA, 20 nt, Artificial Sequence
  targeting sequence with ATCN PAM
cacauuuuuauaaaguugcu

SEQ ID NO: 2659 - RNA, 20 nt, Artificial Sequence
  targeting sequence with ATCN PAM
aucguaccaaaaaggauaga

SEQ ID NO: 2660 - RNA, 20 nt, Artificial Sequence
  targeting sequence with ATCN PAM
uaccaaaaaggauagaaaaa

SEQ ID NO: 2661 - RNA, 20 nt, Artificial Sequence
  targeting sequence with ATCN PAM
uuuuugguacgauagauaau

SEQ ID NO: 2662 - RNA, 20 nt, Artificial Sequence
  targeting sequence with ATCN PAM
ccucagggagcccagguugc

SEQ ID NO: 2663 - RNA, 20 nt, Artificial Sequence
  targeting sequence with ATCN PAM
acugggggaagguacuggaa

SEQ ID NO: 2664 - RNA, 20 nt, Artificial Sequence
  targeting sequence with ATCN PAM
agcauguuaugaaagcuaug

SEQ ID NO: 2665 - RNA, 20 nt, Artificial Sequence
  targeting sequence with ATCN PAM
gcagagguacuucaugaaca

SEQ ID NO: 2666 - RNA, 20 nt, Artificial Sequence
  targeting sequence with ATCN PAM
gcaucugcagagguacuuca

SEQ ID NO: 2667 - RNA, 20 nt, Artificial Sequence
  targeting sequence with ATCN PAM
aguaauuauauaaauaaaca

SEQ ID NO: 2668 - RNA, 20 nt, Artificial Sequence
  targeting sequence with ATCN PAM
uucaacaaauauugauuaaa

SEQ ID NO: 2669 - RNA, 20 nt, Artificial Sequence
  targeting sequence with ATCN PAM
auauuuguugaaugauaauc

SEQ ID NO: 2670 - RNA, 20 nt, Artificial Sequence
  targeting sequence with ATCN PAM
gccaggcacugugcauggga

SEQ ID NO: 2671 - RNA, 20 nt, Artificial Sequence
  targeting sequence with ATCN PAM
uucaugguaaucacuucgua

SEQ ID NO: 2672 - RNA, 20 nt, Artificial Sequence
  targeting sequence with ATCN PAM
ugaccaaucuggauggcaaa

SEQ ID NO: 2673 - RNA, 20 nt, Artificial Sequence
  targeting sequence with ATCN PAM
ggauggcaaaaaaaggcuca

SEQ ID NO: 2674 - RNA, 20 nt, Artificial Sequence
  targeting sequence with ATCN PAM
agauuggucaggauccuuca

SEQ ID NO: 2675 - RNA, 20 nt, Artificial Sequence
  targeting sequence with ATCN PAM
acuaugcuuuuucuggauca

SEQ ID NO: 2676 - RNA, 20 nt, Artificial Sequence
  targeting sequence with ATCN PAM
uuuuccacuugaagaagugc

SEQ ID NO: 2677 - RNA, 20 nt, Artificial Sequence
  targeting sequence with ATCN PAM
gacauauacuuacagcagga

SEQ ID NO: 2678 - RNA, 20 nt, Artificial Sequence
  targeting sequence with ATCN PAM
ugcuguaaguauaugucuga

SEQ ID NO: 2679 - RNA, 20 nt, Artificial Sequence
  targeting sequence with ATCN PAM
augcuuuggacuacaaauaa

SEQ ID NO: 2680 - RNA, 20 nt, Artificial Sequence
  targeting sequence with ATCN PAM
aacacagauauugccuccau

SEQ ID NO: 2681 - RNA, 20 nt, Artificial Sequence
  targeting sequence with ATCN PAM
guguuagauaaauauuuaua

SEQ ID NO: 2682 - RNA, 20 nt, Artificial Sequence
  targeting sequence with ATCN PAM
aaaugguuuauaaugcuuua

SEQ ID NO: 2683 - RNA, 20 nt, Artificial Sequence
  targeting sequence with ATCN PAM
aucaaaaccauuuccaacuu

SEQ ID NO: 2684 - RNA, 20 nt, Artificial Sequence
  targeting sequence with ATCN PAM
aaaccauuuccaacuuauga

SEQ ID NO: 2685 - RNA, 20 nt, Artificial Sequence
  targeting sequence with ATCN PAM
uuuuaauuaaagagggagag

SEQ ID NO: 2686 - RNA, 20 nt, Artificial Sequence
  targeting sequence with ATCN PAM
cugaaacauauaauuuuaag

SEQ ID NO: 2687 - RNA, 20 nt, Artificial Sequence
  targeting sequence with ATCN PAM
uucuaaaaaaauuaaguuca

SEQ ID NO: 2688 - RNA, 20 nt, Artificial Sequence
  targeting sequence with ATCN PAM
acgucuagaaaaccuacauc

SEQ ID NO: 2689 - RNA, 20 nt, Artificial Sequence
  targeting sequence with ATCN PAM
aacuccuugguaagagcagg

SEQ ID NO: 2690 - RNA, 20 nt, Artificial Sequence
  targeting sequence with ATCN PAM
ccagccugacccugcucuua

SEQ ID NO: 2691 - RNA, 20 nt, Artificial Sequence
  targeting sequence with ATCN PAM
ucaaauuauuauaaaagaac

SEQ ID NO: 2692 - RNA, 20 nt, Artificial Sequence
  targeting sequence with ATCN PAM
gccaacaucacaaggacuuc

SEQ ID NO: 2693 - RNA, 20 nt, Artificial Sequence
  targeting sequence with ATCN PAM
caaggacuucauaggcugcc

SEQ ID NO: 2694 - RNA, 20 nt, Artificial Sequence
  targeting sequence with ATCN PAM
gcuauucgcuguacuacacc

SEQ ID NO: 2695 - RNA, 20 nt, Artificial Sequence
  targeting sequence with ATCN PAM
acuuaaauuacucauuaaac

SEQ ID NO: 2696 - RNA, 20 nt, Artificial Sequence
  targeting sequence with ATCN PAM
acaguugaaaugaaaguaga

SEQ ID NO: 2697 - RNA, 20 nt, Artificial Sequence
  targeting sequence with ATCN PAM
cugucauccuaagaagaucu

SEQ ID NO: 2698 - RNA, 20 nt, Artificial Sequence
  targeting sequence with ATCN PAM
uaagaagaucuuaggauggc

SEQ ID NO: 2699 - RNA, 20 nt, Artificial Sequence
  targeting sequence with ATCN PAM
ucuuaggaugacagcgauaa

SEQ ID NO: 2700 - RNA, 20 nt, Artificial Sequence
  targeting sequence with ATCN PAM
uaggauggcagcaaaagaaa

SEQ ID NO: 2701 - RNA, 20 nt, Artificial Sequence
  targeting sequence with ATCN PAM
uaagaucuucuuaggaugac

SEQ ID NO: 2702 - RNA, 20 nt, Artificial Sequence
  targeting sequence with ATCN PAM
auucuggguuuuacagcuuu

SEQ ID NO: 2703 - RNA, 20 nt, Artificial Sequence
  targeting sequence with ATCN PAM
cucaguaaugcaagguuagc

SEQ ID NO: 2704 - RNA, 20 nt, Artificial Sequence
  targeting sequence with ATCN PAM
cugguuaggaaggauacaca

SEQ ID NO: 2705 - RNA, 20 nt, Artificial Sequence
  targeting sequence with ATCN PAM
uuccuaaccagugaucccuc

SEQ ID NO: 2706 - RNA, 20 nt, Artificial Sequence
  targeting sequence with ATCN PAM
ucuuuucuguguauccuucc

SEQ ID NO: 2707 - RNA, 20 nt, Artificial Sequence
  targeting sequence with ATCN PAM
gaacuucaggguugcaaagg

SEQ ID NO: 2708 - RNA, 20 nt, Artificial Sequence
  targeting sequence with ATCN PAM
cuuucuuccuugaagguuuu

SEQ ID NO: 2709 - RNA, 20 nt, Artificial Sequence
  targeting sequence with ATCN PAM
acaccauucaguacaauggg

SEQ ID NO: 2710 - RNA, 20 nt, Artificial Sequence
  targeting sequence with ATCN PAM
cuccccauuguacugaaugg

SEQ ID NO: 2711 - RNA, 20 nt, Artificial Sequence
  targeting sequence with ATCN PAM
aggcacuguauaugauuuuu

SEQ ID NO: 2712 - RNA, 20 nt, Artificial Sequence
  targeting sequence with ATCN PAM
uauacagugccuugauuaaa

SEQ ID NO: 2713 - RNA, 20 nt, Artificial Sequence
  targeting sequence with ATCN PAM
guuuuagguaagaaaaaaaa

SEQ ID NO: 2714 - RNA, 20 nt, Artificial Sequence
  targeting sequence with ATCN PAM
cauauaaauauuucucuacu

SEQ ID NO: 2715 - RNA, 20 nt, Artificial Sequence
  targeting sequence with ATCN PAM
uaucacauauaaauauuucu

SEQ ID NO: 2716 - RNA, 20 nt, Artificial Sequence
  targeting sequence with ATCN PAM
uaagagguaucuuaucacau

SEQ ID NO: 2717 - RNA, 20 nt, Artificial Sequence
  targeting sequence with ATCN PAM
ugaagaaacuauuugcuguu

SEQ ID NO: 2718 - RNA, 20 nt, Artificial Sequence
  targeting sequence with ATCN PAM
aacuaacuuuguuccuuucu

SEQ ID NO: 2719 - RNA, 20 nt, Artificial Sequence
  targeting sequence with ATCN PAM
cuuuguaauguugacccucc

SEQ ID NO: 2720 - RNA, 20 nt, Artificial Sequence
  targeting sequence with ATCN PAM
uucaaauuuguacccauaaa

SEQ ID NO: 2721 - RNA, 20 nt, Artificial Sequence
  targeting sequence with ATCN PAM
aauuuuguauuaguuuuaug

SEQ ID NO: 2722 - RNA, 20 nt, Artificial Sequence
  targeting sequence with ATCN PAM
acuaaaugaagaaaugcaca

SEQ ID NO: 2723 - RNA, 20 nt, Artificial Sequence
  targeting sequence with ATCN PAM
uauauuauccacuaaaugaa

SEQ ID NO: 2724 - RNA, 20 nt, Artificial Sequence
  targeting sequence with ATCN PAM
gugagucuguguauccuaua

SEQ ID NO: 2725 - RNA, 20 nt, Artificial Sequence
  targeting sequence with ATCN PAM
uuugggacugaaguuucaaa

SEQ ID NO: 2726 - RNA, 20 nt, Artificial Sequence
  targeting sequence with ATCN PAM
aaaguauggaaaaugcacgu

SEQ ID NO: 2727 - RNA, 20 nt, Artificial Sequence
  targeting sequence with ATCN PAM
gucaacaggacuuucaucca

SEQ ID NO: 2728 - RNA, 20 nt, Artificial Sequence
  targeting sequence with ATCN PAM
aacaaugguuuaaugaguga

SEQ ID NO: 2729 - RNA, 20 nt, Artificial Sequence
  targeting sequence with ATCN PAM
cucauuaaaccauuguuaga

SEQ ID NO: 2730 - RNA, 20 nt, Artificial Sequence
  targeting sequence with ATCN PAM
ucaacaugaauauuaugcuc

SEQ ID NO: 2731 - RNA, 20 nt, Artificial Sequence
  targeting sequence with ATCN PAM
uugaauuaaaauauguguuc

SEQ ID NO: 2732 - RNA, 20 nt, Artificial Sequence
  targeting sequence with ATCN PAM
uaucuugcacuuucuuauca

SEQ ID NO: 2733 - RNA, 20 nt, Artificial Sequence
  targeting sequence with ATCN PAM
ugcacuuucuuaucagagca

SEQ ID NO: 2734 - RNA, 20 nt, Artificial Sequence
  targeting sequence with ATCN PAM
uuuuaaacuaaaaaggcaag

SEQ ID NO: 2735 - RNA, 20 nt, Artificial Sequence
  targeting sequence with ATCN PAM
cucuuuucuauguaucccca

SEQ ID NO: 2736 - RNA, 20 nt, Artificial Sequence
  targeting sequence with ATCN PAM
ccaguagccaagaauauuuu

SEQ ID NO: 2737 - RNA, 20 nt, Artificial Sequence
  targeting sequence with ATCN PAM
cauauguaccccaccacugg

SEQ ID NO: 2738 - RNA, 20 nt, Artificial Sequence
  targeting sequence with ATCN PAM
gaagaggcagccccuaacca

SEQ ID NO: 2739 - RNA, 20 nt, Artificial Sequence
  targeting sequence with ATCN PAM
cccuuaaaagaagacagaca

SEQ ID NO: 2740 - RNA, 20 nt, Artificial Sequence
  targeting sequence with ATCN PAM
aucuuauuuucccacuuaca

SEQ ID NO: 2741 - RNA, 20 nt, Artificial Sequence
  targeting sequence with ATCN PAM
uauuuucccacuuacacaca

SEQ ID NO: 2742 - RNA, 20 nt, Artificial Sequence
  targeting sequence with ATCN PAM
gccaugugauaagauggagc

SEQ ID NO: 2743 - RNA, 20 nt, Artificial Sequence
  targeting sequence with ATCN PAM
cauggcagauucuucagugc

SEQ ID NO: 2744 - RNA, 20 nt, Artificial Sequence
  targeting sequence with ATCN PAM
uaucacauggcagauucuuc

SEQ ID NO: 2745 - RNA, 20 nt, Artificial Sequence
  targeting sequence with ATCN PAM
agacccuucuuucacucugu

SEQ ID NO: 2746 - RNA, 20 nt, Artificial Sequence
  targeting sequence with ATCN PAM
uacuggcagggcacuuacgc

SEQ ID NO: 2747 - RNA, 20 nt, Artificial Sequence
  targeting sequence with ATCN PAM
uacagcugaaugugagacca

SEQ ID NO: 2748 - RNA, 20 nt, Artificial Sequence
  targeting sequence with ATCN PAM
agccaaguaaucucaucuuc

SEQ ID NO: 2749 - RNA, 20 nt, Artificial Sequence
  targeting sequence with ATCN PAM
caucuucaagcaucguagcu

SEQ ID NO: 2750 - RNA, 20 nt, Artificial Sequence
  targeting sequence with ATCN PAM
ucaagcaucguagcugggcu

SEQ ID NO: 2751 - RNA, 20 nt, Artificial Sequence
  targeting sequence with ATCN PAM
uagcugggcugauccuuaac

SEQ ID NO: 2752 - RNA, 20 nt, Artificial Sequence
  targeting sequence with ATCN PAM
gcccagcuacgaugcuugaa

SEQ ID NO: 2753 - RNA, 20 nt, Artificial Sequence
  targeting sequence with ATCN PAM
uuaacugcuccauuucugaa

SEQ ID NO: 2754 - RNA, 20 nt, Artificial Sequence
  targeting sequence with ATCN PAM
auuacaaagaaagaaggauu

SEQ ID NO: 2755 - RNA, 20 nt, Artificial Sequence
  targeting sequence with ATCN PAM
uuaaggccaggcgagcuggc

SEQ ID NO: 2756 - RNA, 20 nt, Artificial Sequence
  targeting sequence with ATCN PAM
guaaucccagcacuuuggga

SEQ ID NO: 2757 - RNA, 20 nt, Artificial Sequence
  targeting sequence with ATCN PAM
cagcacuuugggaggcugag

SEQ ID NO: 2758 - RNA, 20 nt, Artificial Sequence
  targeting sequence with ATCN PAM
gcccaccucagccucccaaa

SEQ ID NO: 2759 - RNA, 20 nt, Artificial Sequence
  targeting sequence with ATCN PAM
ugaggucaggaguucgagac

SEQ ID NO: 2760 - RNA, 20 nt, Artificial Sequence
  targeting sequence with ATCN PAM
cagcucacugcaaccucugc

SEQ ID NO: 2761 - RNA, 20 nt, Artificial Sequence
  targeting sequence with ATCN PAM
cgccacuguacuccagacug

SEQ ID NO: 2762 - RNA, 20 nt, Artificial Sequence
  targeting sequence with ATCN PAM
uggcacuuugggaggcgaag

SEQ ID NO: 2763 - RNA, 20 nt, Artificial Sequence
  targeting sequence with ATCN PAM
caggcguaagccacugcgcc

SEQ ID NO: 2764 - RNA, 20 nt, Artificial Sequence
  targeting sequence with ATCN PAM
guuucguaagugucugucaa

SEQ ID NO: 2765 - RNA, 20 nt, Artificial Sequence
  targeting sequence with ATCN PAM
gccaccauagaaauguuguu

SEQ ID NO: 2766 - RNA, 20 nt, Artificial Sequence
  targeting sequence with ATCN PAM
cuuucccagcaccuaagucu

SEQ ID NO: 2767 - RNA, 20 nt, Artificial Sequence
  targeting sequence with ATCN PAM
acaaaaauagcaauugguaa

SEQ ID NO: 2768 - RNA, 20 nt, Artificial Sequence
  targeting sequence with ATCN PAM
ugauuuuuauuuuauuaauu

SEQ ID NO: 2769 - RNA, 20 nt, Artificial Sequence
  targeting sequence with ATCN PAM
ggauccacaaaaauagcaau

SEQ ID NO: 2770 - RNA, 20 nt, Artificial Sequence
  targeting sequence with ATCN PAM
ugaguuuguuauucuccgcu

SEQ ID NO: 2771 - RNA, 20 nt, Artificial Sequence
  targeting sequence with ATCN PAM
gaacuaaaauuuacacagag

SEQ ID NO: 2772 - RNA, 20 nt, Artificial Sequence
  targeting sequence with ATCN PAM
guguaauuaaaauaugagcc

SEQ ID NO: 2773 - RNA, 20 nt, Artificial Sequence
  targeting sequence with ATCN PAM
acaaauguucucaauucauu

SEQ ID NO: 2774 - RNA, 20 nt, Artificial Sequence
  targeting sequence with ATCN PAM
gacaaguaaguaaaugacua

SEQ ID NO: 2775 - RNA, 20 nt, Artificial Sequence
  targeting sequence with ATCN PAM
ucuaauaacuggcaucucaa

SEQ ID NO: 2776 - RNA, 20 nt, Artificial Sequence
  targeting sequence with ATCN PAM
aauaacuggcaucucaaauc

SEQ ID NO: 2777 - RNA, 20 nt, Artificial Sequence
  targeting sequence with ATCN PAM
caaaucaaaauacuccauac

SEQ ID NO: 2778 - RNA, 20 nt, Artificial Sequence
  targeting sequence with ATCN PAM
aaauacuccauacacugaga

SEQ ID NO: 2779 - RNA, 20 nt, Artificial Sequence
  targeting sequence with ATCN PAM
caguguauggaguauuuuga

SEQ ID NO: 2780 - RNA, 20 nt, Artificial Sequence
  targeting sequence with ATCN PAM
gccucuuauuaguaacugaa

SEQ ID NO: 2781 - RNA, 20 nt, Artificial Sequence
  targeting sequence with ATCN PAM
ugcucacuuguuuuaugaau

SEQ ID NO: 2782 - RNA, 20 nt, Artificial Sequence
  targeting sequence with ATCN PAM
guaugcuucuugcuaaaaua

SEQ ID NO: 2783 - RNA, 20 nt, Artificial Sequence
  targeting sequence with ATCN PAM
guauuaguaaaaucaguaug

SEQ ID NO: 2784 - RNA, 20 nt, Artificial Sequence
  targeting sequence with ATCN PAM
aucacaucuuaaaauaauau

SEQ ID NO: 2785 - RNA, 20 nt, Artificial Sequence
  targeting sequence with ATCN PAM
caucuuaaaauaauauaugc

SEQ ID NO: 2786 - RNA, 20 nt, Artificial Sequence
  targeting sequence with ATCN PAM
uaaaauaauauaugcacuga

SEQ ID NO: 2787 - RNA, 20 nt, Artificial Sequence
  targeting sequence with ATCN PAM
ucagacuggccuaaugaguu

SEQ ID NO: 2788 - RNA, 20 nt, Artificial Sequence
  targeting sequence with ATCN PAM
gcuguauauuuaugguaaua

SEQ ID NO: 2789 - RNA, 20 nt, Artificial Sequence
  targeting sequence with ATCN PAM
ugaugguaaacuauaacaua

SEQ ID NO: 2790 - RNA, 20 nt, Artificial Sequence
  targeting sequence with ATCN PAM
agauuuaagcugaauuagac

SEQ ID NO: 2791 - RNA, 20 nt, Artificial Sequence
  targeting sequence with ATCN PAM
ggaauguuaaaacagaaggu

SEQ ID NO: 2792 - RNA, 20 nt, Artificial Sequence
  targeting sequence with ATCN PAM
cggcuucuacauaaauauua

SEQ ID NO: 2793 - RNA, 20 nt, Artificial Sequence
  targeting sequence with ATCN PAM
cuguauauuagaaagugcau

SEQ ID NO: 2794 - RNA, 20 nt, Artificial Sequence
  targeting sequence with ATCN PAM
aaaacagagguauuaaaaaa

SEQ ID NO: 2795 - RNA, 20 nt, Artificial Sequence
  targeting sequence with ATCN PAM
auucuugacuuuuuuuaaua

SEQ ID NO: 2796 - RNA, 20 nt, Artificial Sequence
  targeting sequence with ATCN PAM
aagaaaccagagggaaaauu

SEQ ID NO: 2797 - RNA, 20 nt, Artificial Sequence
  targeting sequence with ATCN PAM
cauaacacuucuuuugauau

SEQ ID NO: 2798 - RNA, 20 nt, Artificial Sequence
  targeting sequence with ATCN PAM
uuucaaaaaaccagcuccuc

SEQ ID NO: 2799 - RNA, 20 nt, Artificial Sequence
  targeting sequence with ATCN PAM
aggagcugguuuuuugaaaa

SEQ ID NO: 2800 - RNA, 20 nt, Artificial Sequence
  targeting sequence with ATCN PAM
gugaaucgaggagcugguuu

SEQ ID NO: 2801 - RNA, 20 nt, Artificial Sequence
  targeting sequence with ATCN PAM
ucuucaguucugcucugauc

SEQ ID NO: 2802 - RNA, 20 nt, Artificial Sequence
  targeting sequence with ATCN PAM
gagcagaacugaagaagaua

SEQ ID NO: 2803 - RNA, 20 nt, Artificial Sequence
  targeting sequence with ATCN PAM
uaguuauuuuuugccuucug

SEQ ID NO: 2804 - RNA, 20 nt, Artificial Sequence
  targeting sequence with ATCN PAM
caauuaaaagaacuagagaa

SEQ ID NO: 2805 - RNA, 20 nt, Artificial Sequence
  targeting sequence with ATCN PAM
acaauugacacccuaacauc

SEQ ID NO: 2806 - RNA, 20 nt, Artificial Sequence
  targeting sequence with ATCN PAM
uuccugcuuucuccuguggg

SEQ ID NO: 2807 - RNA, 20 nt, Artificial Sequence
  targeting sequence with ATCN PAM
cugggacacagcuaaagcaa

SEQ ID NO: 2808 - RNA, 20 nt, Artificial Sequence
  targeting sequence with ATCN PAM
cacaacuacauggaaacuga

SEQ ID NO: 2809 - RNA, 20 nt, Artificial Sequence
  targeting sequence with ATCN PAM
acagaauauacauucuuuuc

SEQ ID NO: 2810 - RNA, 20 nt, Artificial Sequence
  targeting sequence with ATCN PAM
acagaacucuccaccccaaa

SEQ ID NO: 2811 - RNA, 20 nt, Artificial Sequence
  targeting sequence with ATCN PAM
cugaauagaccaauaacaag

SEQ ID NO: 2812 - RNA, 20 nt, Artificial Sequence
  targeting sequence with ATCN PAM
gguccugggccuuuuuuggu

SEQ ID NO: 2813 - RNA, 20 nt, Artificial Sequence
  targeting sequence with ATCN PAM
aucugguccugggccuuuuu

SEQ ID NO: 2814 - RNA, 20 nt, Artificial Sequence
  targeting sequence with ATCN PAM
cucuuauuuaacauaguauu

SEQ ID NO: 2815 - RNA, 20 nt, Artificial Sequence
  targeting sequence with ATCN PAM
ggcaagagaaagaaauaaag

SEQ ID NO: 2816 - RNA, 20 nt, Artificial Sequence
  targeting sequence with ATCN PAM
gaauacccuuuauuucuuuc

SEQ ID NO: 2817 - RNA, 20 nt, Artificial Sequence
  targeting sequence with ATCN PAM
gcaaacagagacaguuugac

SEQ ID NO: 2818 - RNA, 20 nt, Artificial Sequence
  targeting sequence with ATCN PAM
ugucaucugcaaacagagac

SEQ ID NO: 2819 - RNA, 20 nt, Artificial Sequence
  targeting sequence with ATCN PAM
ucucucaggccaaaaucucc

SEQ ID NO: 2820 - RNA, 20 nt, Artificial Sequence
  targeting sequence with ATCN PAM
ccuuaagcaacuucagcaaa

SEQ ID NO: 2821 - RNA, 20 nt, Artificial Sequence
  targeting sequence with ATCN PAM
ugagacuuugcugaaguugc

SEQ ID NO: 2822 - RNA, 20 nt, Artificial Sequence
  targeting sequence with ATCN PAM
augugcaaaaucacaaacau

SEQ ID NO: 2823 - RNA, 20 nt, Artificial Sequence
  targeting sequence with ATCN PAM
caaacauuccuauacacgaa

SEQ ID NO: 2824 - RNA, 20 nt, Artificial Sequence
  targeting sequence with ATCN PAM
ugagugaacucccauucaca

SEQ ID NO: 2825 - RNA, 20 nt, Artificial Sequence
  targeting sequence with ATCN PAM
auguugugaaaauggccacg

SEQ ID NO: 2826 - RNA, 20 nt, Artificial Sequence
  targeting sequence with ATCN PAM
auaaauuacuuugggcagcg

SEQ ID NO: 2827 - RNA, 20 nt, Artificial Sequence
  targeting sequence with ATCN PAM
ccaucaagcuaccacugacu

SEQ ID NO: 2828 - RNA, 20 nt, Artificial Sequence
  targeting sequence with ATCN PAM
agcuaccacugacuuucuuc

SEQ ID NO: 2829 - RNA, 20 nt, Artificial Sequence
  targeting sequence with ATCN PAM
uaagcaaaaagaacaaagcu

SEQ ID NO: 2830 - RNA, 20 nt, Artificial Sequence
  targeting sequence with ATCN PAM
ugcuaccugacuucaaacua

SEQ ID NO: 2831 - RNA, 20 nt, Artificial Sequence
  targeting sequence with ATCN PAM
uuuucuuguuuuuaauguaa

SEQ ID NO: 2832 - RNA, 20 nt, Artificial Sequence
  targeting sequence with ATCN PAM
uuguuauuucuuuccuuuua

SEQ ID NO: 2833 - RNA, 20 nt, Artificial Sequence
  targeting sequence with ATCN PAM
augaaaccaaaaguugccuc

SEQ ID NO: 2834 - RNA, 20 nt, Artificial Sequence
  targeting sequence with ATCN PAM
uucucccuuuuuuguguuag

SEQ ID NO: 2835 - RNA, 20 nt, Artificial Sequence
  targeting sequence with ATCN PAM
aauuacuaaacucagaaaug

SEQ ID NO: 2836 - RNA, 20 nt, Artificial Sequence
  targeting sequence with ATCN PAM
aaaaaaaaaaaaagaaaaga

SEQ ID NO: 2837 - RNA, 20 nt, Artificial Sequence
  targeting sequence with ATCN PAM
gguccagggcuuuucuuugu

SEQ ID NO: 2838 - RNA, 20 nt, Artificial Sequence
  targeting sequence with ATCN PAM
aaauugaaaagggaguaaaa

SEQ ID NO: 2839 - RNA, 20 nt, Artificial Sequence
  targeting sequence with ATCN PAM
guuaacagaugacauguuac

SEQ ID NO: 2840 - RNA, 20 nt, Artificial Sequence
  targeting sequence with ATCN PAM
guuaacagauaauuuuacuc

SEQ ID NO: 2841 - RNA, 20 nt, Artificial Sequence
  targeting sequence with ATCN PAM
cggcucacugcaagcuccgc

SEQ ID NO: 2842 - RNA, 20 nt, Artificial Sequence
  targeting sequence with ATCN PAM
acaauuccacuuacaauagc

SEQ ID NO: 2843 - RNA, 20 nt, Artificial Sequence
  targeting sequence with ATCN PAM
aaaauaauaaaauacuuagg

SEQ ID NO: 2844 - RNA, 20 nt, Artificial Sequence
  targeting sequence with ATCN PAM
acaaacauugcugaaagaaa

SEQ ID NO: 2845 - RNA, 20 nt, Artificial Sequence
  targeting sequence with ATCN PAM
uuaauuucuuucagcaaugu

SEQ ID NO: 2846 - RNA, 20 nt, Artificial Sequence
  targeting sequence with ATCN PAM
uguguucaaggauugaaaga

SEQ ID NO: 2847 - RNA, 20 nt, Artificial Sequence
  targeting sequence with ATCN PAM
uugaacacaagaugucuuuu

SEQ ID NO: 2848 - RNA, 20 nt, Artificial Sequence
  targeting sequence with ATCN PAM
ugugucacaaaguuuucccu

SEQ ID NO: 2849 - RNA, 20 nt, Artificial Sequence
  targeting sequence with ATCN PAM
gcaacauacaugacagacaa

SEQ ID NO: 2850 - RNA, 20 nt, Artificial Sequence
  targeting sequence with ATCN PAM
ccaaacugggaaaauaaaau

SEQ ID NO: 2851 - RNA, 20 nt, Artificial Sequence
  targeting sequence with ATCN PAM
gagguagguaauaaaaaugg

SEQ ID NO: 2852 - RNA, 20 nt, Artificial Sequence
  targeting sequence with ATCN PAM
ucacggcucagcugccucuc

SEQ ID NO: 2853 - RNA, 20 nt, Artificial Sequence
  targeting sequence with ATCN PAM
guuucuucuaggcguaaucc

SEQ ID NO: 2854 - RNA, 20 nt, Artificial Sequence
  targeting sequence with ATCN PAM
ggaugcgcugaugugucugu

SEQ ID NO: 2855 - RNA, 20 nt, Artificial Sequence
  targeting sequence with ATCN PAM
agaugugcagaagccaaauc

SEQ ID NO: 2856 - RNA, 20 nt, Artificial Sequence
  targeting sequence with ATCN PAM
gcgcauccagaugugcagaa

SEQ ID NO: 2857 - RNA, 20 nt, Artificial Sequence
  targeting sequence with ATCN PAM
gcuguacacucuuagucaga

SEQ ID NO: 2858 - RNA, 20 nt, Artificial Sequence
  targeting sequence with ATCN PAM
caggcaacccggcgaaucug

SEQ ID NO: 2859 - RNA, 20 nt, Artificial Sequence
  targeting sequence with ATCN PAM
gaaauuacaugaucagcagc

SEQ ID NO: 2860 - RNA, 20 nt, Artificial Sequence
  targeting sequence with ATCN PAM
uguaauuucagauucgccgg

SEQ ID NO: 2861 - RNA, 20 nt, Artificial Sequence
  targeting sequence with ATCN PAM
gcagcaaaggacagacauga

SEQ ID NO: 2862 - RNA, 20 nt, Artificial Sequence
  targeting sequence with ATCN PAM
acauguugagacugcuuaaa

SEQ ID NO: 2863 - RNA, 20 nt, Artificial Sequence
  targeting sequence with ATCN PAM
uuaccucagcacuuggugau

SEQ ID NO: 2864 - RNA, 20 nt, Artificial Sequence
  targeting sequence with ATCN PAM
ccaagugcugagguaaggau

SEQ ID NO: 2865 - RNA, 20 nt, Artificial Sequence
  targeting sequence with ATCN PAM
gagcagaauaucaaugauga

SEQ ID NO: 2866 - RNA, 20 nt, Artificial Sequence
  targeting sequence with ATCN PAM
augaugaaaucagcaacaca

SEQ ID NO: 2867 - RNA, 20 nt, Artificial Sequence
  targeting sequence with ATCN PAM
uugauauucugcucggauca

SEQ ID NO: 2868 - RNA, 20 nt, Artificial Sequence
  targeting sequence with ATCN PAM
gcaacacagggcaaguuaua

SEQ ID NO: 2869 - RNA, 20 nt, Artificial Sequence
  targeting sequence with ATCN PAM
uucuauaacuugcccugugu

SEQ ID NO: 2870 - RNA, 20 nt, Artificial Sequence
  targeting sequence with ATCN PAM
cccauuucuucuuauuagca

SEQ ID NO: 2871 - RNA, 20 nt, Artificial Sequence
  targeting sequence with ATCN PAM
aaauuugaaaaugcauuacc

SEQ ID NO: 2872 - RNA, 20 nt, Artificial Sequence
  targeting sequence with ATCN PAM
aggcaagacauuuauucugu

SEQ ID NO: 2873 - RNA, 20 nt, Artificial Sequence
  targeting sequence with ATCN PAM
auaguugcaaacuauaaaau

SEQ ID NO: 2874 - RNA, 20 nt, Artificial Sequence
  targeting sequence with ATCN PAM
uuuguaaguuuauuuuaagg

SEQ ID NO: 2875 - RNA, 20 nt, Artificial Sequence
  targeting sequence with ATCN PAM
guuaucauuuguaaguuuau

SEQ ID NO: 2876 - RNA, 20 nt, Artificial Sequence
  targeting sequence with ATCN PAM
uuacaaggggguggacacug

SEQ ID NO: 2877 - RNA, 20 nt, Artificial Sequence
  targeting sequence with ATCN PAM
ucuugcuucugccuugcagu

SEQ ID NO: 2878 - RNA, 20 nt, Artificial Sequence
  targeting sequence with ATCN PAM
aggaagaaauguaaagaauu

SEQ ID NO: 2879 - RNA, 20 nt, Artificial Sequence
  targeting sequence with ATCN PAM
cuuucagggaaaggccaagu

SEQ ID NO: 2880 - RNA, 20 nt, Artificial Sequence
  targeting sequence with ATCN PAM
caaacaagccuccagcauac

SEQ ID NO: 2881 - RNA, 20 nt, Artificial Sequence
  targeting sequence with ATCN PAM
gcgagucuuugguggauaca

SEQ ID NO: 2882 - RNA, 20 nt, Artificial Sequence
  targeting sequence with ATCN PAM
accaaagacucgcugauugc

SEQ ID NO: 2883 - RNA, 20 nt, Artificial Sequence
  targeting sequence with ATCN PAM
guguucgacaacagucugua

SEQ ID NO: 2884 - RNA, 20 nt, Artificial Sequence
  targeting sequence with ATCN PAM
acaguaaauuucugcuuacc

SEQ ID NO: 2885 - RNA, 20 nt, Artificial Sequence
  targeting sequence with ATCN PAM
uacaggaacuaugcaauauu

SEQ ID NO: 2886 - RNA, 20 nt, Artificial Sequence
  targeting sequence with ATCN PAM
aaauguguucacaaggcaaa

SEQ ID NO: 2887 - RNA, 20 nt, Artificial Sequence
  targeting sequence with ATCN PAM
ccugaaauuaguuuugccuu

SEQ ID NO: 2888 - RNA, 20 nt, Artificial Sequence
  targeting sequence with ATCN PAM
cuauuuuagaaauaccucaa

SEQ ID NO: 2889 - RNA, 20 nt, Artificial Sequence
  targeting sequence with ATCN PAM
uuguggcaauaauacaaauu

SEQ ID NO: 2890 - RNA, 20 nt, Artificial Sequence
  targeting sequence with ATCN PAM
acaguuuuuagcuuagcuga

SEQ ID NO: 2891 - RNA, 20 nt, Artificial Sequence
  targeting sequence with ATCN PAM
agcucuguauacacuuagua

SEQ ID NO: 2892 - RNA, 20 nt, Artificial Sequence
  targeting sequence with ATCN PAM
guaccugaacugcugagucu

SEQ ID NO: 2893 - RNA, 20 nt, Artificial Sequence
  targeting sequence with ATCN PAM
uguugggaguagccagccaa

SEQ ID NO: 2894 - RNA, 20 nt, Artificial Sequence
  targeting sequence with ATCN PAM
agccguccugcagccgcagc

SEQ ID NO: 2895 - RNA, 20 nt, Artificial Sequence
  targeting sequence with ATCN PAM
caugaagcaagccacaguag

SEQ ID NO: 2896 - RNA, 20 nt, Artificial Sequence
  targeting sequence with ATCN PAM
cuuacuuccauugucuaaag

SEQ ID NO: 2897 - RNA, 20 nt, Artificial Sequence
  targeting sequence with ATCN PAM
cuuacuuguauugcaacucg

SEQ ID NO: 2898 - RNA, 20 nt, Artificial Sequence
  targeting sequence with ATCN PAM
cugcugcucgaguugcaaua

SEQ ID NO: 2899 - RNA, 20 nt, Artificial Sequence
  targeting sequence with ATCN PAM
ucccugcugcucgaguugca

SEQ ID NO: 2900 - RNA, 20 nt, Artificial Sequence
  targeting sequence with ATCN PAM
gacacggacaacugucggua

SEQ ID NO: 2901 - RNA, 20 nt, Artificial Sequence
  targeting sequence with ATCN PAM
uaccgacaguuguccguguc

SEQ ID NO: 2902 - RNA, 20 nt, Artificial Sequence
  targeting sequence with ATCN PAM
gucugcuugucugccggcug

SEQ ID NO: 2903 - RNA, 20 nt, Artificial Sequence
  targeting sequence with ATCN PAM
uuggugaggucuucaucuaa

SEQ ID NO: 2904 - RNA, 20 nt, Artificial Sequence
  targeting sequence with ATCN PAM
aauaacgugggcauuguuug

SEQ ID NO: 2905 - RNA, 20 nt, Artificial Sequence
  targeting sequence with ATCN PAM
uaaaaagaaacagcuagacu

SEQ ID NO: 2906 - RNA, 20 nt, Artificial Sequence
  targeting sequence with ATCN PAM
gucuacagcuugcaagguau

SEQ ID NO: 2907 - RNA, 20 nt, Artificial Sequence
  targeting sequence with ATCN PAM
gaaguagacuaugaaacaag

SEQ ID NO: 2908 - RNA, 20 nt, Artificial Sequence
  targeting sequence with ATCN PAM
caucagaaguagacuaugaa

SEQ ID NO: 2909 - RNA, 20 nt, Artificial Sequence
  targeting sequence with ATCN PAM
ugccuuuuuuucuucuuuuu

SEQ ID NO: 2910 - RNA, 20 nt, Artificial Sequence
  targeting sequence with ATCN PAM
gucaucaucaauuacuuagu

SEQ ID NO: 2911 - RNA, 20 nt, Artificial Sequence
  targeting sequence with ATCN PAM
ucaauuacuuaguuucuaca

SEQ ID NO: 2912 - RNA, 20 nt, Artificial Sequence
  targeting sequence with ATCN PAM
auuacuuaguuucuacauga

SEQ ID NO: 2913 - RNA, 20 nt, Artificial Sequence
  targeting sequence with ATCN PAM
uucaaugguuuccuauuucc

SEQ ID NO: 2914 - RNA, 20 nt, Artificial Sequence
  targeting sequence with ATCN PAM
ccuucaggucuuugcuagau

SEQ ID NO: 2915 - RNA, 20 nt, Artificial Sequence
  targeting sequence with ATCN PAM
agcaaagaccugaaggagau

SEQ ID NO: 2916 - RNA, 20 nt, Artificial Sequence
  targeting sequence with ATCN PAM
ggaaaagcuucgcuggggug

SEQ ID NO: 2917 - RNA, 20 nt, Artificial Sequence
  targeting sequence with ATCN PAM
cccuacugaaaaucauagcc

SEQ ID NO: 2918 - RNA, 20 nt, Artificial Sequence
  targeting sequence with ATCN PAM
cucagccauuuacagggcug

SEQ ID NO: 2919 - RNA, 20 nt, Artificial Sequence
  targeting sequence with ATCN PAM
ucugcucaugcuuugagcug

SEQ ID NO: 2920 - RNA, 20 nt, Artificial Sequence
  targeting sequence with ATCN PAM
uuugcuugaacaccaggcaa

SEQ ID NO: 2921 - RNA, 20 nt, Artificial Sequence
  targeting sequence with ATCN PAM
ccugucuugggaaccucagu

SEQ ID NO: 2922 - RNA, 20 nt, Artificial Sequence
  targeting sequence with ATCN PAM
gcugccucucaaaggcagag

SEQ ID NO: 2923 - RNA, 20 nt, Artificial Sequence
  targeting sequence with ATCN PAM
cugccuuugagaggcagcug

SEQ ID NO: 2924 - RNA, 20 nt, Artificial Sequence
  targeting sequence with ATCN PAM
aauuuaucuuugcaucccca

SEQ ID NO: 2925 - RNA, 20 nt, Artificial Sequence
  targeting sequence with ATCN PAM
guuucuuuugugucucaugu

SEQ ID NO: 2926 - RNA, 20 nt, Artificial Sequence
  targeting sequence with ATCN PAM
uucugugaaaacuuccucaa

SEQ ID NO: 2927 - RNA, 20 nt, Artificial Sequence
  targeting sequence with ATCN PAM
ucagcuguuggcaugaguuu

SEQ ID NO: 2928 - RNA, 20 nt, Artificial Sequence
  targeting sequence with ATCN PAM
gcuguuggcaugaguuugga

SEQ ID NO: 2929 - RNA, 20 nt, Artificial Sequence
  targeting sequence with ATCN PAM
guucccuagguucuaagcuc

SEQ ID NO: 2930 - RNA, 20 nt, Artificial Sequence
  targeting sequence with ATCN PAM
acacauuuucagcagaaauu

SEQ ID NO: 2931 - RNA, 20 nt, Artificial Sequence
  targeting sequence with ATCN PAM
ugaaacaucagcuucuacau

SEQ ID NO: 2932 - RNA, 20 nt, Artificial Sequence
  targeting sequence with ATCN PAM
cauuuucccuauucuauuua

SEQ ID NO: 2933 - RNA, 20 nt, Artificial Sequence
  targeting sequence with ATCN PAM
uuccguucuagagaaagcug

SEQ ID NO: 2934 - RNA, 20 nt, Artificial Sequence
  targeting sequence with ATCN PAM
agcauaucacaugaaauuau

SEQ ID NO: 2935 - RNA, 20 nt, Artificial Sequence
  targeting sequence with ATCN PAM
uucuaaagaauauaucuagc

SEQ ID NO: 2936 - RNA, 20 nt, Artificial Sequence
  targeting sequence with ATCN PAM
ugcauuuuuaauauaugggc

SEQ ID NO: 2937 - RNA, 20 nt, Artificial Sequence
  targeting sequence with ATCN PAM
uaacuuaauaagcaguuguu

SEQ ID NO: 2938 - RNA, 20 nt, Artificial Sequence
  targeting sequence with ATCN PAM
aaggaauucacaccuacuca

SEQ ID NO: 2939 - RNA, 20 nt, Artificial Sequence
  targeting sequence with ATCN PAM
caagaugcaaauucuuuagg

SEQ ID NO: 2940 - RNA, 20 nt, Artificial Sequence
  targeting sequence with ATCN PAM
ugugauuccugccagaucug

SEQ ID NO: 2941 - RNA, 20 nt, Artificial Sequence
  targeting sequence with ATCN PAM
guuuauuaaacagggugaac

SEQ ID NO: 2942 - RNA, 20 nt, Artificial Sequence
  targeting sequence with ATCN PAM
uuccugugaaaagacauguu

SEQ ID NO: 2943 - RNA, 20 nt, Artificial Sequence
  targeting sequence with ATCN PAM
caccuugaagcaguaagaua

SEQ ID NO: 2944 - RNA, 20 nt, Artificial Sequence
  targeting sequence with ATCN PAM
uacugcuucaaggugugaug

SEQ ID NO: 2945 - RNA, 20 nt, Artificial Sequence
  targeting sequence with ATCN PAM
aggcacuaaagaauagaauc

SEQ ID NO: 2946 - RNA, 20 nt, Artificial Sequence
  targeting sequence with ATCN PAM
uucagggcuuuauuuucuuc

SEQ ID NO: 2947 - RNA, 20 nt, Artificial Sequence
  targeting sequence with ATCN PAM
uuugccccgggaaugucuac

SEQ ID NO: 2948 - RNA, 20 nt, Artificial Sequence
  targeting sequence with ATCN PAM
aaacagacuuucuaaaauug

SEQ ID NO: 2949 - RNA, 20 nt, Artificial Sequence
  targeting sequence with ATCN PAM
aagcaacagcaccagccaag

SEQ ID NO: 2950 - RNA, 20 nt, Artificial Sequence
  targeting sequence with ATCN PAM
cugucaucaaagcaacagca

SEQ ID NO: 2951 - RNA, 20 nt, Artificial Sequence
  targeting sequence with ATCN PAM
ccaucccugucaucaaagca

SEQ ID NO: 2952 - RNA, 20 nt, Artificial Sequence
  targeting sequence with ATCN PAM
aguucucaguccucaaaauc

SEQ ID NO: 2953 - RNA, 20 nt, Artificial Sequence
  targeting sequence with ATCN PAM
cuaaauacugauaauaaaau

SEQ ID NO: 2954 - RNA, 20 nt, Artificial Sequence
  targeting sequence with ATCN PAM
guauuuagagauacaaauuu

SEQ ID NO: 2955 - RNA, 20 nt, Artificial Sequence
  targeting sequence with ATCN PAM
uauaauuuuauuaucaguau

SEQ ID NO: 2956 - RNA, 20 nt, Artificial Sequence
  targeting sequence with ATCN PAM
guuaagcuaauacuagugau

SEQ ID NO: 2957 - RNA, 20 nt, Artificial Sequence
  targeting sequence with ATCN PAM
auuuauucugagaacauaau

SEQ ID NO: 2958 - RNA, 20 nt, Artificial Sequence
  targeting sequence with ATCN PAM
auaauauuguuuaauuaugu

SEQ ID NO: 2959 - RNA, 20 nt, Artificial Sequence
  targeting sequence with ATCN PAM
cuuaaggaacaacauucuaa

SEQ ID NO: 2960 - RNA, 20 nt, Artificial Sequence
  targeting sequence with ATCN PAM
acugugaaaaaauuaaauga

SEQ ID NO: 2961 - RNA, 20 nt, Artificial Sequence
  targeting sequence with ATCN PAM
uuuaauuuuuucacaguuga

SEQ ID NO: 2962 - RNA, 20 nt, Artificial Sequence
  targeting sequence with ATCN PAM
auuuauauuagcaacucaga

SEQ ID NO: 2963 - RNA, 20 nt, Artificial Sequence
  targeting sequence with ATCN PAM
uugcguaugucugaguugcu

SEQ ID NO: 2964 - RNA, 20 nt, Artificial Sequence
  targeting sequence with ATCN PAM
gauucaaagaggcaucaugg

SEQ ID NO: 2965 - RNA, 20 nt, Artificial Sequence
  targeting sequence with ATCN PAM
gaucauugcguaugucugag

SEQ ID NO: 2966 - RNA, 20 nt, Artificial Sequence
  targeting sequence with ATCN PAM
uggguaaugaaaaacgucuc

SEQ ID NO: 2967 - RNA, 20 nt, Artificial Sequence
  targeting sequence with ATCN PAM
caacuagagucugaucuggg

SEQ ID NO: 2968 - RNA, 20 nt, Artificial Sequence
  targeting sequence with ATCN PAM
gacucuaguugugauucagu

SEQ ID NO: 2969 - RNA, 20 nt, Artificial Sequence
  targeting sequence with ATCN PAM
gggacaaguaacuucauccc

SEQ ID NO: 2970 - RNA, 20 nt, Artificial Sequence
  targeting sequence with ATCN PAM
uccuaccucagccuccugag

SEQ ID NO: 2971 - RNA, 20 nt, Artificial Sequence
  targeting sequence with ATCN PAM
caccagcuaauuuuuuuauu

SEQ ID NO: 2972 - RNA, 20 nt, Artificial Sequence
  targeting sequence with ATCN PAM
caauucagugagugaaaaua

SEQ ID NO: 2973 - RNA, 20 nt, Artificial Sequence
  targeting sequence with ATCN PAM
aguugaucaagggcuuccug

SEQ ID NO: 2974 - RNA, 20 nt, Artificial Sequence
  targeting sequence with ATCN PAM
acuugauucuuuaggaagaa

SEQ ID NO: 2975 - RNA, 20 nt, Artificial Sequence
  targeting sequence with ATCN PAM
agggcuuccugaauggcugg

SEQ ID NO: 2976 - RNA, 20 nt, Artificial Sequence
  targeting sequence with ATCN PAM
agccauucaggaagcccuug

SEQ ID NO: 2977 - RNA, 20 nt, Artificial Sequence
  targeting sequence with ATCN PAM
guggguaucaagagcagaag

SEQ ID NO: 2978 - RNA, 20 nt, Artificial Sequence
  targeting sequence with ATCN PAM
agagcagaagcuuccguacu

SEQ ID NO: 2979 - RNA, 20 nt, Artificial Sequence
  targeting sequence with ATCN PAM
ugaaguuuuucaaauacaaa

SEQ ID NO: 2980 - RNA, 20 nt, Artificial Sequence
  targeting sequence with ATCN PAM
ggaagagccaagguaaauau

SEQ ID NO: 2981 - RNA, 20 nt, Artificial Sequence
  targeting sequence with ATCN PAM
gcucgccaaucuggaagagc

SEQ ID NO: 2982 - RNA, 20 nt, Artificial Sequence
  targeting sequence with ATCN PAM
cuacaccagggagggauuuc

SEQ ID NO: 2983 - RNA, 20 nt, Artificial Sequence
  targeting sequence with ATCN PAM
cucccugguguagugauggc

SEQ ID NO: 2984 - RNA, 20 nt, Artificial Sequence
  targeting sequence with ATCN PAM
ggagaaaucccucccuggug

SEQ ID NO: 2985 - RNA, 20 nt, Artificial Sequence
  targeting sequence with ATCN PAM
cucccccuguucucuacugg

SEQ ID NO: 2986 - RNA, 20 nt, Artificial Sequence
  targeting sequence with ATCN PAM
cuuuuaugcaguuauaacca

SEQ ID NO: 2987 - RNA, 20 nt, Artificial Sequence
  targeting sequence with ATCN PAM
gaaucucuuuuaugcaguua

SEQ ID NO: 2988 - RNA, 20 nt, Artificial Sequence
  targeting sequence with ATCN PAM
gacaucauuacacaacguau

SEQ ID NO: 2989 - RNA, 20 nt, Artificial Sequence
  targeting sequence with ATCN PAM
uuacacaacguauuuacaag

SEQ ID NO: 2990 - RNA, 20 nt, Artificial Sequence
  targeting sequence with ATCN PAM
ucccacuuguaaauacguug

SEQ ID NO: 2991 - RNA, 20 nt, Artificial Sequence
  targeting sequence with ATCN PAM
ugaauuuauuaaaaaucuuc

SEQ ID NO: 2992 - RNA, 20 nt, Artificial Sequence
  targeting sequence with ATCN PAM
ucaaguuuaauaauuuuuaa

SEQ ID NO: 2993 - RNA, 20 nt, Artificial Sequence
  targeting sequence with ATCN PAM
uucugagugggguuucuuuu

SEQ ID NO: 2994 - RNA, 20 nt, Artificial Sequence
  targeting sequence with ATCN PAM
aagaacucuucaaguuuagu

SEQ ID NO: 2995 - RNA, 20 nt, Artificial Sequence
  targeting sequence with ATCN PAM
cucuaguaagguuuaugcuc

SEQ ID NO: 2996 - RNA, 20 nt, Artificial Sequence
  targeting sequence with ATCN PAM
uuuuaauuuacagagcauaa

SEQ ID NO: 2997 - RNA, 20 nt, Artificial Sequence
  targeting sequence with ATCN PAM
auauuucaaugacuucauga

SEQ ID NO: 2998 - RNA, 20 nt, Artificial Sequence
  targeting sequence with ATCN PAM
uguucuaggcacuguuuuag

SEQ ID NO: 2999 - RNA, 20 nt, Artificial Sequence
  targeting sequence with ATCN PAM
cgaauugagcuccuuauacc

SEQ ID NO: 3000 - RNA, 20 nt, Artificial Sequence
  targeting sequence with ATCN PAM
uaauuuaucccgaauugagc

SEQ ID NO: 3001 - RNA, 20 nt, Artificial Sequence
  targeting sequence with ATCN PAM
cuuaagugucuacuaggcac

SEQ ID NO: 3002 - RNA, 20 nt, Artificial Sequence
  targeting sequence with ATCN PAM
acuuaacaucucuuaagugu

SEQ ID NO: 3003 - RNA, 20 nt, Artificial Sequence
  targeting sequence with ATCN PAM
auccacuuaacaucucuuaa

SEQ ID NO: 3004 - RNA, 20 nt, Artificial Sequence
  targeting sequence with ATCN PAM
auuuauuucagguuaaaacu

SEQ ID NO: 3005 - RNA, 20 nt, Artificial Sequence
  targeting sequence with ATCN PAM
gcaaagcuccuugaaacagu

SEQ ID NO: 3006 - RNA, 20 nt, Artificial Sequence
  targeting sequence with ATCN PAM
cacuuacaccuucaguuacu

SEQ ID NO: 3007 - RNA, 20 nt, Artificial Sequence
  targeting sequence with ATCN PAM
auuuccauuuaaaaacaaga

SEQ ID NO: 3008 - RNA, 20 nt, Artificial Sequence
  targeting sequence with ATCN PAM
cccaguaccugcuccauggc

SEQ ID NO: 3009 - RNA, 20 nt, Artificial Sequence
  targeting sequence with ATCN PAM
gcugaacucccagauggggu

SEQ ID NO: 3010 - RNA, 20 nt, Artificial Sequence
  targeting sequence with ATCN PAM
gggaguucagcagauucuuc

SEQ ID NO: 3011 - RNA, 20 nt, Artificial Sequence
  targeting sequence with ATCN PAM
uuacagugaagacuucuggc

SEQ ID NO: 3012 - RNA, 20 nt, Artificial Sequence
  targeting sequence with ATCN PAM
gaaaagcccaguugguggag

SEQ ID NO: 3013 - RNA, 20 nt, Artificial Sequence
  targeting sequence with ATCN PAM
aaagcuacuccaccaacugg

SEQ ID NO: 3014 - RNA, 20 nt, Artificial Sequence
  targeting sequence with ATCN PAM
uuauucacugucagcugcaa

SEQ ID NO: 3015 - RNA, 20 nt, Artificial Sequence
  targeting sequence with ATCN PAM
uuuauuauucaucaaaacug

SEQ ID NO: 3016 - RNA, 20 nt, Artificial Sequence
  targeting sequence with ATCN PAM
aaacugcuuauuuaaaccua

SEQ ID NO: 3017 - RNA, 20 nt, Artificial Sequence
  targeting sequence with ATCN PAM
uuuguaaauaucuguauauu

SEQ ID NO: 3018 - RNA, 20 nt, Artificial Sequence
  targeting sequence with ATCN PAM
guauauuauccacaggagag

SEQ ID NO: 3019 - RNA, 20 nt, Artificial Sequence
  targeting sequence with ATCN PAM
acaggagagcacaacugcuu

SEQ ID NO: 3020 - RNA, 20 nt, Artificial Sequence
  targeting sequence with ATCN PAM
gcuuguaccccacaguuuca

SEQ ID NO: 3021 - RNA, 20 nt, Artificial Sequence
  targeting sequence with ATCN PAM
uugguagacucauagguaac

SEQ ID NO: 3022 - RNA, 20 nt, Artificial Sequence
  targeting sequence with ATCN PAM
uuuaacccuuaauguuaccu

SEQ ID NO: 3023 - RNA, 20 nt, Artificial Sequence
  targeting sequence with ATCN PAM
uuaaaaaacgaauaagucaa

SEQ ID NO: 3024 - RNA, 20 nt, Artificial Sequence
  targeting sequence with ATCN PAM
gacuugacuuauucguuuuu

SEQ ID NO: 3025 - RNA, 20 nt, Artificial Sequence
  targeting sequence with ATCN PAM
cuugaguccagccuaagcaa

SEQ ID NO: 3026 - RNA, 20 nt, Artificial Sequence
  targeting sequence with ATCN PAM
uaaaaaaaggaaguggcuua

SEQ ID NO: 3027 - RNA, 20 nt, Artificial Sequence
  targeting sequence with ATCN PAM
cuauagagguaagccacuuc

SEQ ID NO: 3028 - RNA, 20 nt, Artificial Sequence
  targeting sequence with ATCN PAM
cauagcgcucugccagaagc

SEQ ID NO: 3029 - RNA, 20 nt, Artificial Sequence
  targeting sequence with ATCN PAM
cucaauuauuacaaguuuag

SEQ ID NO: 3030 - RNA, 20 nt, Artificial Sequence
  targeting sequence with ATCN PAM
acuaaacuuguaauaauuga

SEQ ID NO: 3031 - RNA, 20 nt, Artificial Sequence
  targeting sequence with ATCN PAM
auagauuaaaaaaaaaaagu

SEQ ID NO: 3032 - RNA, 20 nt, Artificial Sequence
  targeting sequence with ATCN PAM
auagaucuacuaaacuugua

SEQ ID NO: 3033 - RNA, 20 nt, Artificial Sequence
  targeting sequence with ATCN PAM
cacuucaaauacauuuuaau

SEQ ID NO: 3034 - RNA, 20 nt, Artificial Sequence
  targeting sequence with ATCN PAM
ucacacuucaaauacauuuu

SEQ ID NO: 3035 - RNA, 20 nt, Artificial Sequence
  targeting sequence with ATCN PAM
gagcucaguucuagucuguu

SEQ ID NO: 3036 - RNA, 20 nt, Artificial Sequence
  targeting sequence with ATCN PAM
uauaacuaaaauaugauaua

SEQ ID NO: 3037 - RNA, 20 nt, Artificial Sequence
  targeting sequence with ATCN PAM
uauuuuaguuauaagauaaa

SEQ ID NO: 3038 - RNA, 20 nt, Artificial Sequence
  targeting sequence with ATCN PAM
gacaaaguucugaacugccu

SEQ ID NO: 3039 - RNA, 20 nt, Artificial Sequence
  targeting sequence with ATCN PAM
guaaguacgacacaaacaaa

SEQ ID NO: 3040 - RNA, 20 nt, Artificial Sequence
  targeting sequence with ATCN PAM
auaauuguuccaacuugggg

SEQ ID NO: 3041 - RNA, 20 nt, Artificial Sequence
  targeting sequence with ATCN PAM
cauuucacuaguuuggaaag

SEQ ID NO: 3042 - RNA, 20 nt, Artificial Sequence
  targeting sequence with ATCN PAM
uuucauauuugguggacuac

SEQ ID NO: 3043 - RNA, 20 nt, Artificial Sequence
  targeting sequence with ATCN PAM
ugaguugaaucuaucauuac

SEQ ID NO: 3044 - RNA, 20 nt, Artificial Sequence
  targeting sequence with ATCN PAM
aucauuacuucugccauuua

SEQ ID NO: 3045 - RNA, 20 nt, Artificial Sequence
  targeting sequence with ATCN PAM
uuacuucugccauuuaaaaa

SEQ ID NO: 3046 - RNA, 20 nt, Artificial Sequence
  targeting sequence with ATCN PAM
aagcaaugaguccuuucuuc

SEQ ID NO: 3047 - RNA, 20 nt, Artificial Sequence
  targeting sequence with ATCN PAM
cguugugaauaagaauagcc

SEQ ID NO: 3048 - RNA, 20 nt, Artificial Sequence
  targeting sequence with ATCN PAM
cuagagggcagcagcagagu

SEQ ID NO: 3049 - RNA, 20 nt, Artificial Sequence
  targeting sequence with ATCN PAM
cauugcuguuuuuugaguuu

SEQ ID NO: 3050 - RNA, 20 nt, Artificial Sequence
  targeting sequence with ATCN PAM
ccaaauguuugugugaaaac

SEQ ID NO: 3051 - RNA, 20 nt, Artificial Sequence
  targeting sequence with ATCN PAM
uagucacuaaaauauuauuc

SEQ ID NO: 3052 - RNA, 20 nt, Artificial Sequence
  targeting sequence with ATCN PAM
uaugcaagcauaaugcauac

SEQ ID NO: 3053 - RNA, 20 nt, Artificial Sequence
  targeting sequence with ATCN PAM
ucuucuacuucauucugcuu

SEQ ID NO: 3054 - RNA, 20 nt, Artificial Sequence
  targeting sequence with ATCN PAM
ucuacuucauucugcuuacc

SEQ ID NO: 3055 - RNA, 20 nt, Artificial Sequence
  targeting sequence with ATCN PAM
aauaaaaacuaaaacaagaa

SEQ ID NO: 3056 - RNA, 20 nt, Artificial Sequence
  targeting sequence with ATCN PAM
ccaggaccacccgaguacuu

SEQ ID NO: 3057 - RNA, 20 nt, Artificial Sequence
  targeting sequence with ATCN PAM
gugccucuuuggaaguucug

SEQ ID NO: 3058 - RNA, 20 nt, Artificial Sequence
  targeting sequence with ATCN PAM
gaagugaaaaauacacaaca

SEQ ID NO: 3059 - RNA, 20 nt, Artificial Sequence
  targeting sequence with ATCN PAM
cuuaccuauaaggagacuga

SEQ ID NO: 3060 - RNA, 20 nt, Artificial Sequence
  targeting sequence with ATCN PAM
ggguuucucaaccuggacuc

SEQ ID NO: 3061 - RNA, 20 nt, Artificial Sequence
  targeting sequence with ATCN PAM
aaauaugucauuauaaaaaa

SEQ ID NO: 3062 - RNA, 20 nt, Artificial Sequence
  targeting sequence with ATCN PAM
aagcaaaaauguuccaaaag

SEQ ID NO: 3063 - RNA, 20 nt, Artificial Sequence
  targeting sequence with ATCN PAM
acugaauaugaauguuuaag

SEQ ID NO: 3064 - RNA, 20 nt, Artificial Sequence
  targeting sequence with ATCN PAM
cuuuuauuuccagcaugacg

SEQ ID NO: 3065 - RNA, 20 nt, Artificial Sequence
  targeting sequence with ATCN PAM
agccacaaacaucaacauua

SEQ ID NO: 3066 - RNA, 20 nt, Artificial Sequence
  targeting sequence with ATCN PAM
acauuauaaauuaucuaaaa

SEQ ID NO: 3067 - RNA, 20 nt, Artificial Sequence
  targeting sequence with ATCN PAM
aaaaauauaaaauuaugaaa

SEQ ID NO: 3068 - RNA, 20 nt, Artificial Sequence
  targeting sequence with ATCN PAM
cuuugagguaaaugcuuuuu

SEQ ID NO: 3069 - RNA, 20 nt, Artificial Sequence
  targeting sequence with ATCN PAM
uguguagcaaucagcaauga

SEQ ID NO: 3070 - RNA, 20 nt, Artificial Sequence
  targeting sequence with ATCN PAM
gcaaugaauuucuuauguaa

SEQ ID NO: 3071 - RNA, 20 nt, Artificial Sequence
  targeting sequence with ATCN PAM
uuacauaagaaauucauugc

SEQ ID NO: 3072 - RNA, 20 nt, Artificial Sequence
  targeting sequence with ATCN PAM
ugaaagaguauauggaaauu

SEQ ID NO: 3073 - RNA, 20 nt, Artificial Sequence
  targeting sequence with ATCN PAM
uuauucaggacaaaauauca

SEQ ID NO: 3074 - RNA, 20 nt, Artificial Sequence
  targeting sequence with ATCN PAM
aaauaaagaagccaauuuuu

SEQ ID NO: 3075 - RNA, 20 nt, Artificial Sequence
  targeting sequence with ATCN PAM
auauacaaaaaagcagaaaa

SEQ ID NO: 3076 - RNA, 20 nt, Artificial Sequence
  targeting sequence with ATCN PAM
aaggaaagaaguuauccaua

SEQ ID NO: 3077 - RNA, 20 nt, Artificial Sequence
  targeting sequence with ATCN PAM
aggauuuagauuaauguaac

SEQ ID NO: 3078 - RNA, 20 nt, Artificial Sequence
  targeting sequence with ATCN PAM
uagauuaaagaagguaggua

SEQ ID NO: 3079 - RNA, 20 nt, Artificial Sequence
  targeting sequence with ATCN PAM
aaauccuagauuaaagaagg

SEQ ID NO: 3080 - RNA, 20 nt, Artificial Sequence
  targeting sequence with ATCN PAM
uaaacuauaguuacauuaau

SEQ ID NO: 3081 - RNA, 20 nt, Artificial Sequence
  targeting sequence with ATCN PAM
ggugauuccauggcuauuuu

SEQ ID NO: 3082 - RNA, 20 nt, Artificial Sequence
  targeting sequence with ATCN PAM
ccugaugaagaaauugcuaa

SEQ ID NO: 3083 - RNA, 20 nt, Artificial Sequence
  targeting sequence with ATCN PAM
auuccuaucaauuccagcuu

SEQ ID NO: 3084 - RNA, 20 nt, Artificial Sequence
  targeting sequence with ATCN PAM
auuccagcuuuucuacauac

SEQ ID NO: 3085 - RNA, 20 nt, Artificial Sequence
  targeting sequence with ATCN PAM
agaucacaaaguuacaaaau

SEQ ID NO: 3086 - RNA, 20 nt, Artificial Sequence
  targeting sequence with ATCN PAM
ugauaugcuuuauaauuuaa

SEQ ID NO: 3087 - RNA, 20 nt, Artificial Sequence
  targeting sequence with ATCN PAM
caaaguuacaaaaucacaga

SEQ ID NO: 3088 - RNA, 20 nt, Artificial Sequence
  targeting sequence with ATCN PAM
ugaguccacaccucuucagu

SEQ ID NO: 3089 - RNA, 20 nt, Artificial Sequence
  targeting sequence with ATCN PAM
guauaauauuauuuucauau

SEQ ID NO: 3090 - RNA, 20 nt, Artificial Sequence
  targeting sequence with ATCN PAM
aguauaacuugauauucagc

SEQ ID NO: 3091 - RNA, 20 nt, Artificial Sequence
  targeting sequence with ATCN PAM
aaacuaucuagauuugagaa

SEQ ID NO: 3092 - RNA, 20 nt, Artificial Sequence
  targeting sequence with ATCN PAM
agauuugagaauaacguacu

SEQ ID NO: 3093 - RNA, 20 nt, Artificial Sequence
  targeting sequence with ATCN PAM
agauaguuuggauaaucuag

SEQ ID NO: 3094 - RNA, 20 nt, Artificial Sequence
  targeting sequence with ATCN PAM
augaucacaaagauucacau

SEQ ID NO: 3095 - RNA, 20 nt, Artificial Sequence
  targeting sequence with ATCN PAM
auugaaaagacaaggagcuc

SEQ ID NO: 3096 - RNA, 20 nt, Artificial Sequence
  targeting sequence with ATCN PAM
ucgauugaaaagacaaggag

SEQ ID NO: 3097 - RNA, 20 nt, Artificial Sequence
  targeting sequence with ATCN PAM
caaagauucacauuuucaaa

SEQ ID NO: 3098 - RNA, 20 nt, Artificial Sequence
  targeting sequence with ATCN PAM
uugugaucaucgauugaaaa

SEQ ID NO: 3099 - RNA, 20 nt, Artificial Sequence
  targeting sequence with ATCN PAM
ucaacaauacuuguuauuau

SEQ ID NO: 3100 - RNA, 20 nt, Artificial Sequence
  targeting sequence with ATCN PAM
caccagcaauauaugagggu

SEQ ID NO: 3101 - RNA, 20 nt, Artificial Sequence
  targeting sequence with ATCN PAM
gacuucuagauauacaucca

SEQ ID NO: 3102 - RNA, 20 nt, Artificial Sequence
  targeting sequence with ATCN PAM
agaagucagauuguucugac

SEQ ID NO: 3103 - RNA, 20 nt, Artificial Sequence
  targeting sequence with ATCN PAM
aagagaaaugcaaacucgua

SEQ ID NO: 3104 - RNA, 20 nt, Artificial Sequence
  targeting sequence with ATCN PAM
aauugccaaauugucuuuuu

SEQ ID NO: 3105 - RNA, 20 nt, Artificial Sequence
  targeting sequence with ATCN PAM
agcaggccauaugauuuaaa

SEQ ID NO: 3106 - RNA, 20 nt, Artificial Sequence
  targeting sequence with ATCN PAM
uauggccugcuagaucaaau

SEQ ID NO: 3107 - RNA, 20 nt, Artificial Sequence
  targeting sequence with ATCN PAM
uauaauuaguuuuuaaauca

SEQ ID NO: 3108 - RNA, 20 nt, Artificial Sequence
  targeting sequence with ATCN PAM
uuuuuuucaguacuuuuaag

SEQ ID NO: 3109 - RNA, 20 nt, Artificial Sequence
  targeting sequence with ATCN PAM
cuaugaaugguaggaaaaaa

SEQ ID NO: 3110 - RNA, 20 nt, Artificial Sequence
  targeting sequence with ATCN PAM
cucucaagaucaugcugucc

SEQ ID NO: 3111 - RNA, 20 nt, Artificial Sequence
  targeting sequence with ATCN PAM
ugagagugauguucagcagc

SEQ ID NO: 3112 - RNA, 20 nt, Artificial Sequence
  targeting sequence with ATCN PAM
ugcuguccuuuuguaaacca

SEQ ID NO: 3113 - RNA, 20 nt, Artificial Sequence
  targeting sequence with ATCN PAM
guggaauaagacgaauauca

SEQ ID NO: 3114 - RNA, 20 nt, Artificial Sequence
  targeting sequence with ATCN PAM
cccuauaacuaagauccauu

SEQ ID NO: 3115 - RNA, 20 nt, Artificial Sequence
  targeting sequence with ATCN PAM
uaguuauagggugauauucg

SEQ ID NO: 3116 - RNA, 20 nt, Artificial Sequence
  targeting sequence with ATCN PAM
auuucaggcacauacauauu

SEQ ID NO: 3117 - RNA, 20 nt, Artificial Sequence
  targeting sequence with ATCN PAM
acaauaccaccuucuuaccu

SEQ ID NO: 3118 - RNA, 20 nt, Artificial Sequence
  targeting sequence with ATCN PAM
aauucacaaacauccuggcc

SEQ ID NO: 3119 - RNA, 20 nt, Artificial Sequence
  targeting sequence with ATCN PAM
uggccaguuacaagacacuc

SEQ ID NO: 3120 - RNA, 20 nt, Artificial Sequence
  targeting sequence with ATCN PAM
gggagugucuuguaacuggc

SEQ ID NO: 3121 - RNA, 20 nt, Artificial Sequence
  targeting sequence with ATCN PAM
ccuuggcacgauuccagccc

SEQ ID NO: 3122 - RNA, 20 nt, Artificial Sequence
  targeting sequence with ATCN PAM
ugccaaggagaucugggagu

SEQ ID NO: 3123 - RNA, 20 nt, Artificial Sequence
  targeting sequence with ATCN PAM
gggcuggaaucgugccaagg

SEQ ID NO: 3124 - RNA, 20 nt, Artificial Sequence
  targeting sequence with ATCN PAM
aaaauuucuagcguuuuucu

SEQ ID NO: 3125 - RNA, 20 nt, Artificial Sequence
  targeting sequence with ATCN PAM
ugaagcaaaaacacaaggcc

SEQ ID NO: 3126 - RNA, 20 nt, Artificial Sequence
  targeting sequence with ATCN PAM
ggccuuguguuuuugcuuca

SEQ ID NO: 3127 - RNA, 20 nt, Artificial Sequence
  targeting sequence with ATCN PAM
acuagugucgagccacuuaa

SEQ ID NO: 3128 - RNA, 20 nt, Artificial Sequence
  targeting sequence with ATCN PAM
gcuugcagcugcuguggccg

SEQ ID NO: 3129 - RNA, 20 nt, Artificial Sequence
  targeting sequence with ATCN PAM
cuugucaucggcuugcagcu

SEQ ID NO: 3130 - RNA, 20 nt, Artificial Sequence
  targeting sequence with ATCN PAM
aacuucccguuaccaauuuc

SEQ ID NO: 3131 - RNA, 20 nt, Artificial Sequence
  targeting sequence with ATCN PAM
aaagcaagacaagguaaggg

SEQ ID NO: 3132 - RNA, 20 nt, Artificial Sequence
  targeting sequence with ATCN PAM
ccaguuuguaugggugguac

SEQ ID NO: 3133 - RNA, 20 nt, Artificial Sequence
  targeting sequence with ATCN PAM
cagcuuaauaauccccaguu

SEQ ID NO: 3134 - RNA, 20 nt, Artificial Sequence
  targeting sequence with ATCN PAM
gcuguuuauuucuaaauuua

SEQ ID NO: 3135 - RNA, 20 nt, Artificial Sequence
  targeting sequence with ATCN PAM
gguuuacuguuacacauuuu

SEQ ID NO: 3136 - RNA, 20 nt, Artificial Sequence
  targeting sequence with ATCN PAM
ccaugcacucauaauucagu

SEQ ID NO: 3137 - RNA, 20 nt, Artificial Sequence
  targeting sequence with ATCN PAM
acuccuguuugcaguucuua

SEQ ID NO: 3138 - RNA, 20 nt, Artificial Sequence
  targeting sequence with ATCN PAM
gcaaaaaacagacaacaagg

SEQ ID NO: 3139 - RNA, 20 nt, Artificial Sequence
  targeting sequence with ATCN PAM
ucugaaguugcuaauuccuu

SEQ ID NO: 3140 - RNA, 20 nt, Artificial Sequence
  targeting sequence with ATCN PAM
auccucugaaguugcuaauu

SEQ ID NO: 3141 - RNA, 20 nt, Artificial Sequence
  targeting sequence with ATCN PAM
guuuauuuugugucaacaug

SEQ ID NO: 3142 - RNA, 20 nt, Artificial Sequence
  targeting sequence with ATCN PAM
aaguuaagcuuuggccauca

SEQ ID NO: 3143 - RNA, 20 nt, Artificial Sequence
  targeting sequence with ATCN PAM
uagaaagcaauauucuuacu

SEQ ID NO: 3144 - RNA, 20 nt, Artificial Sequence
  targeting sequence with ATCN PAM
uagucauauaaucauagaaa

SEQ ID NO: 3145 - RNA, 20 nt, Artificial Sequence
  targeting sequence with ATCN PAM
uugguauccuagucauauaa

SEQ ID NO: 3146 - RNA, 20 nt, Artificial Sequence
  targeting sequence with ATCN PAM
uaucauugguauccuaguca

SEQ ID NO: 3147 - RNA, 20 nt, Artificial Sequence
  targeting sequence with ATCN PAM
agacacugguaguggucuaa

SEQ ID NO: 3148 - RNA, 20 nt, Artificial Sequence
  targeting sequence with ATCN PAM
guauuuccuaguuaaaacac

SEQ ID NO: 3149 - RNA, 20 nt, Artificial Sequence
  targeting sequence with ATCN PAM
agaucgucauaguacagauc

SEQ ID NO: 3150 - RNA, 20 nt, Artificial Sequence
  targeting sequence with ATCN PAM
ggauugucauauaccaguuu

SEQ ID NO: 3151 - RNA, 20 nt, Artificial Sequence
  targeting sequence with ATCN PAM
ucauaguacagaucuaaaaa

SEQ ID NO: 3152 - RNA, 20 nt, Artificial Sequence
  targeting sequence with ATCN PAM
uucaaacuaugaaauuucaa

SEQ ID NO: 3153 - RNA, 20 nt, Artificial Sequence
  targeting sequence with ATCN PAM
cacuauugaauauguaaaug

SEQ ID NO: 3154 - RNA, 20 nt, Artificial Sequence
  targeting sequence with ATCN PAM
cuaugaggcaaggaaaaaag

SEQ ID NO: 3155 - RNA, 20 nt, Artificial Sequence
  targeting sequence with ATCN PAM
gccaauccucaaucagcaaa

SEQ ID NO: 3156 - RNA, 20 nt, Artificial Sequence
  targeting sequence with ATCN PAM
ucaaucagcaaauacuguau

SEQ ID NO: 3157 - RNA, 20 nt, Artificial Sequence
  targeting sequence with ATCN PAM
gcaaauacuguauuuccuag

SEQ ID NO: 3158 - RNA, 20 nt, Artificial Sequence
  targeting sequence with ATCN PAM
aggaaauacaguauuugcug

SEQ ID NO: 3159 - RNA, 20 nt, Artificial Sequence
  targeting sequence with ATCN PAM
uugucuuagaaucuaggaaa

SEQ ID NO: 3160 - RNA, 20 nt, Artificial Sequence
  targeting sequence with ATCN PAM
gaaauugacacuuuagacaa

SEQ ID NO: 3161 - RNA, 20 nt, Artificial Sequence
  targeting sequence with ATCN PAM
acaugccucaaaauuauaca

SEQ ID NO: 3162 - RNA, 20 nt, Artificial Sequence
  targeting sequence with ATCN PAM
gagaugcagggugcaaucac

SEQ ID NO: 3163 - RNA, 20 nt, Artificial Sequence
  targeting sequence with ATCN PAM
cagauuuaauaaacuugcaa

SEQ ID NO: 3164 - RNA, 20 nt, Artificial Sequence
  targeting sequence with ATCN PAM
cuggcaucuuagaaucacag

SEQ ID NO: 3165 - RNA, 20 nt, Artificial Sequence
  targeting sequence with ATCN PAM
uagaaucacagaaauaaggu

SEQ ID NO: 3166 - RNA, 20 nt, Artificial Sequence
  targeting sequence with ATCN PAM
cagaaauaagguauauauua

SEQ ID NO: 3167 - RNA, 20 nt, Artificial Sequence
  targeting sequence with ATCN PAM
aaacagauaccuucccaaaa

SEQ ID NO: 3168 - RNA, 20 nt, Artificial Sequence
  targeting sequence with ATCN PAM
guuuggauauaaaccuuaca

SEQ ID NO: 3169 - RNA, 20 nt, Artificial Sequence
  targeting sequence with ATCN PAM
uuuugggaagguaucuguuu

SEQ ID NO: 3170 - RNA, 20 nt, Artificial Sequence
  targeting sequence with ATCN PAM
ugauggccaauuaagucaau

SEQ ID NO: 3171 - RNA, 20 nt, Artificial Sequence
  targeting sequence with ATCN PAM
ugauacuuuuuaauauauuu

SEQ ID NO: 3172 - RNA, 20 nt, Artificial Sequence
  targeting sequence with ATCN PAM
uuugaagguaacuuguuaua

SEQ ID NO: 3173 - RNA, 20 nt, Artificial Sequence
  targeting sequence with ATCN PAM
gaaauaauucuuaaauuuua

SEQ ID NO: 3174 - RNA, 20 nt, Artificial Sequence
  targeting sequence with ATCN PAM
uuccuguuugcuaaacuuua

SEQ ID NO: 3175 - RNA, 20 nt, Artificial Sequence
  targeting sequence with ATCN PAM
uaucuaugacguggugacaa

SEQ ID NO: 3176 - RNA, 20 nt, Artificial Sequence
  targeting sequence with ATCN PAM
augacguggugacaaguuau

SEQ ID NO: 3177 - RNA, 20 nt, Artificial Sequence
  targeting sequence with ATCN PAM
ucauuguaauuggagaagag

SEQ ID NO: 3178 - RNA, 20 nt, Artificial Sequence
  targeting sequence with ATCN PAM
gauaaugucacagaguggag

SEQ ID NO: 3179 - RNA, 20 nt, Artificial Sequence
  targeting sequence with ATCN PAM
gauaucuucauuguaauugg

SEQ ID NO: 3180 - RNA, 20 nt, Artificial Sequence
  targeting sequence with ATCN PAM
ccacucugugacauuaucag

SEQ ID NO: 3181 - RNA, 20 nt, Artificial Sequence
  targeting sequence with ATCN PAM
gguccuacuuaugaaaucuc

SEQ ID NO: 3182 - RNA, 20 nt, Artificial Sequence
  targeting sequence with ATCN PAM
caucagguccuacuuaugaa

SEQ ID NO: 3183 - RNA, 20 nt, Artificial Sequence
  targeting sequence with ATCN PAM
aauguugaguccaauuuaga

SEQ ID NO: 3184 - RNA, 20 nt, Artificial Sequence
  targeting sequence with TTCN PAM
gaugggacccaagguggucu

SEQ ID NO: 3185 - RNA, 20 nt, Artificial Sequence
  targeting sequence with TTCN PAM
gaugauucagaugggaccca

SEQ ID NO: 3186 - RNA, 20 nt, Artificial Sequence
  targeting sequence with TTCN PAM
cuaugacauucugaugauuc

SEQ ID NO: 3187 - RNA, 20 nt, Artificial Sequence
  targeting sequence with TTCN PAM
gauccuuuugauuauuucuc

SEQ ID NO: 3188 - RNA, 20 nt, Artificial Sequence
  targeting sequence with TTCN PAM
agcgcaaagcugaggaugac

SEQ ID NO: 3189 - RNA, 20 nt, Artificial Sequence
  targeting sequence with TTCN PAM
cagauggucauccucagcuu

SEQ ID NO: 3190 - RNA, 20 nt, Artificial Sequence
  targeting sequence with TTCN PAM
auuuagagucuguguuuccc

SEQ ID NO: 3191 - RNA, 20 nt, Artificial Sequence
  targeting sequence with TTCN PAM
uaccacagagaugacacaau

SEQ ID NO: 3192 - RNA, 20 nt, Artificial Sequence
  targeting sequence with TTCN PAM
gacugucauugugucaucuc

SEQ ID NO: 3193 - RNA, 20 nt, Artificial Sequence
  targeting sequence with TTCN PAM
ucuccuaggauacaacuuuu

SEQ ID NO: 3194 - RNA, 20 nt, Artificial Sequence
  targeting sequence with TTCN PAM
uccagaagagcccaguuuca

SEQ ID NO: 3195 - RNA, 20 nt, Artificial Sequence
  targeting sequence with TTCN PAM
agaagagcccaguuucacca

SEQ ID NO: 3196 - RNA, 20 nt, Artificial Sequence
  targeting sequence with TTCN PAM
ggaagaagaugcccaauagu

SEQ ID NO: 3197 - RNA, 20 nt, Artificial Sequence
  targeting sequence with TTCN PAM
ccaugguugaagacuugcuu

SEQ ID NO: 3198 - RNA, 20 nt, Artificial Sequence
  targeting sequence with TTCN PAM
accauggugaaacugggcuc

SEQ ID NO: 3199 - RNA, 20 nt, Artificial Sequence
  targeting sequence with TTCN PAM
caguccaacccauuccugaa

SEQ ID NO: 3200 - RNA, 20 nt, Artificial Sequence
  targeting sequence with TTCN PAM
ugaaucuguguaauuguccc

SEQ ID NO: 3201 - RNA, 20 nt, Artificial Sequence
  targeting sequence with TTCN PAM
ggaauggguuggacugagaa

SEQ ID NO: 3202 - RNA, 20 nt, Artificial Sequence
  targeting sequence with TTCN PAM
ucuuaacuaagcacuuacca

SEQ ID NO: 3203 - RNA, 20 nt, Artificial Sequence
  targeting sequence with TTCN PAM
cuuccuuucuuccuaguuuc

SEQ ID NO: 3204 - RNA, 20 nt, Artificial Sequence
  targeting sequence with TTCN PAM
uuccuuacuauaucgagaac

SEQ ID NO: 3205 - RNA, 20 nt, Artificial Sequence
  targeting sequence with TTCN PAM
uuacuauaucgagaacuuuc

SEQ ID NO: 3206 - RNA, 20 nt, Artificial Sequence
  targeting sequence with TTCN PAM
cgauauaguaaggaaagaaa

SEQ ID NO: 3207 - RNA, 20 nt, Artificial Sequence
  targeting sequence with TTCN PAM
ucuucucacuuaaaggaagc

SEQ ID NO: 3208 - RNA, 20 nt, Artificial Sequence
  targeting sequence with TTCN PAM
ucucacuuaaaggaagcacu

SEQ ID NO: 3209 - RNA, 20 nt, Artificial Sequence
  targeting sequence with TTCN PAM
cacuuaaaggaagcacucuc

SEQ ID NO: 3210 - RNA, 20 nt, Artificial Sequence
  targeting sequence with TTCN PAM
uuuaagugagaagaagaaag

SEQ ID NO: 3211 - RNA, 20 nt, Artificial Sequence
  targeting sequence with TTCN PAM
gggagaccugugaggagagu

SEQ ID NO: 3212 - RNA, 20 nt, Artificial Sequence
  targeting sequence with TTCN PAM
uccuccauguggcaccgagu

SEQ ID NO: 3213 - RNA, 20 nt, Artificial Sequence
  targeting sequence with TTCN PAM
cucucauuuagacauucuuc

SEQ ID NO: 3214 - RNA, 20 nt, Artificial Sequence
  targeting sequence with TTCN PAM
ucagaacucagcucaaaagu

SEQ ID NO: 3215 - RNA, 20 nt, Artificial Sequence
  targeting sequence with TTCN PAM
gaacucagcucaaaaguuac

SEQ ID NO: 3216 - RNA, 20 nt, Artificial Sequence
  targeting sequence with TTCN PAM
gaagaaugucuaaaugagag

SEQ ID NO: 3217 - RNA, 20 nt, Artificial Sequence
  targeting sequence with TTCN PAM
ucaaggaagccuuuccugac

SEQ ID NO: 3218 - RNA, 20 nt, Artificial Sequence
  targeting sequence with TTCN PAM
uugaggaaguaacuuuugag

SEQ ID NO: 3219 - RNA, 20 nt, Artificial Sequence
  targeting sequence with TTCN PAM
ugacauugcccacauuagaa

SEQ ID NO: 3220 - RNA, 20 nt, Artificial Sequence
  targeting sequence with TTCN PAM
acauuuuuggguaucuuuac

SEQ ID NO: 3221 - RNA, 20 nt, Artificial Sequence
  targeting sequence with TTCN PAM
aaaguugcuuccacauuuuu

SEQ ID NO: 3222 - RNA, 20 nt, Artificial Sequence
  targeting sequence with TTCN PAM
gccuguuacccaguuccaaa

SEQ ID NO: 3223 - RNA, 20 nt, Artificial Sequence
  targeting sequence with TTCN PAM
aacuucugccuguuacccag

SEQ ID NO: 3224 - RNA, 20 nt, Artificial Sequence
  targeting sequence with TTCN PAM
gagcccugcaaacuguucca

SEQ ID NO: 3225 - RNA, 20 nt, Artificial Sequence
  targeting sequence with TTCN PAM
ucugagcccugcaaacuguu

SEQ ID NO: 3226 - RNA, 20 nt, Artificial Sequence
  targeting sequence with TTCN PAM
ugucuucuucugagcccugc

SEQ ID NO: 3227 - RNA, 20 nt, Artificial Sequence
  targeting sequence with TTCN PAM
cacauuuuccugucuucuuc

SEQ ID NO: 3228 - RNA, 20 nt, Artificial Sequence
  targeting sequence with TTCN PAM
aaacuuucccacauuuuccu

SEQ ID NO: 3229 - RNA, 20 nt, Artificial Sequence
  targeting sequence with TTCN PAM
uagagacuuguugaauggcu

SEQ ID NO: 3230 - RNA, 20 nt, Artificial Sequence
  targeting sequence with TTCN PAM
acaagucucuaggaaguucc

SEQ ID NO: 3231 - RNA, 20 nt, Artificial Sequence
  targeting sequence with TTCN PAM
uuguccauauuauuauuagc

SEQ ID NO: 3232 - RNA, 20 nt, Artificial Sequence
  targeting sequence with TTCN PAM
ucaucuccaucugagacuac

SEQ ID NO: 3233 - RNA, 20 nt, Artificial Sequence
  targeting sequence with TTCN PAM
caacaaguuccucaucucca

SEQ ID NO: 3234 - RNA, 20 nt, Artificial Sequence
  targeting sequence with TTCN PAM
acaaaucucuaaggcagggg

SEQ ID NO: 3235 - RNA, 20 nt, Artificial Sequence
  targeting sequence with TTCN PAM
aaguuccacaaaucucuaag

SEQ ID NO: 3236 - RNA, 20 nt, Artificial Sequence
  targeting sequence with TTCN PAM
aguucaaaguuccacaaauc

SEQ ID NO: 3237 - RNA, 20 nt, Artificial Sequence
  targeting sequence with TTCN PAM
agaggugacuugggugcugu

SEQ ID NO: 3238 - RNA, 20 nt, Artificial Sequence
  targeting sequence with TTCN PAM
guuuuaaaaugaaguagagc

SEQ ID NO: 3239 - RNA, 20 nt, Artificial Sequence
  targeting sequence with TTCN PAM
uuuuaaaacugaaugcuuuu

SEQ ID NO: 3240 - RNA, 20 nt, Artificial Sequence
  targeting sequence with TTCN PAM
gaaaauuugcagcuugauaa

SEQ ID NO: 3241 - RNA, 20 nt, Artificial Sequence
  targeting sequence with TTCN PAM
gaacuuuuaugcucuacuuc

SEQ ID NO: 3242 - RNA, 20 nt, Artificial Sequence
  targeting sequence with TTCN PAM
auuguauuaucaagcugcaa

SEQ ID NO: 3243 - RNA, 20 nt, Artificial Sequence
  targeting sequence with TTCN PAM
uuucuauuguauuaucaagc

SEQ ID NO: 3244 - RNA, 20 nt, Artificial Sequence
  targeting sequence with TTCN PAM
gagaagaaauucaaacuggc

SEQ ID NO: 3245 - RNA, 20 nt, Artificial Sequence
  targeting sequence with TTCN PAM
cagaaaauggguuuuucuuu

SEQ ID NO: 3246 - RNA, 20 nt, Artificial Sequence
  targeting sequence with TTCN PAM
ucucagaaaauggguuuuuc

SEQ ID NO: 3247 - RNA, 20 nt, Artificial Sequence
  targeting sequence with TTCN PAM
aacuggcugcagaaauuugc

SEQ ID NO: 3248 - RNA, 20 nt, Artificial Sequence
  targeting sequence with TTCN PAM
gcagccaguuugaauuucuu

SEQ ID NO: 3249 - RNA, 20 nt, Artificial Sequence
  targeting sequence with TTCN PAM
cuccaugucucacagccggg

SEQ ID NO: 3250 - RNA, 20 nt, Artificial Sequence
  targeting sequence with TTCN PAM
ggccccacuuacaguuucuu

SEQ ID NO: 3251 - RNA, 20 nt, Artificial Sequence
  targeting sequence with TTCN PAM
ucauugaauuuaucuguuug

SEQ ID NO: 3252 - RNA, 20 nt, Artificial Sequence
  targeting sequence with TTCN PAM
uugaauuuaucuguuugaaa

SEQ ID NO: 3253 - RNA, 20 nt, Artificial Sequence
  targeting sequence with TTCN PAM
augaagaaacuguaaguggg

SEQ ID NO: 3254 - RNA, 20 nt, Artificial Sequence
  targeting sequence with TTCN PAM
aacagauaaauucaaugaag

SEQ ID NO: 3255 - RNA, 20 nt, Artificial Sequence
  targeting sequence with TTCN PAM
aauaaucauauaaauauaua

SEQ ID NO: 3256 - RNA, 20 nt, Artificial Sequence
  targeting sequence with TTCN PAM
ccauguugcccaggcagguc

SEQ ID NO: 3257 - RNA, 20 nt, Artificial Sequence
  targeting sequence with TTCN PAM
acuaauaaaagauauacuca

SEQ ID NO: 3258 - RNA, 20 nt, Artificial Sequence
  targeting sequence with TTCN PAM
uauuccacuaauaaaagaua

SEQ ID NO: 3259 - RNA, 20 nt, Artificial Sequence
  targeting sequence with TTCN PAM
gacggauuucaccaagucuu

SEQ ID NO: 3260 - RNA, 20 nt, Artificial Sequence
  targeting sequence with TTCN PAM
ccaagucuuuuaagucauug

SEQ ID NO: 3261 - RNA, 20 nt, Artificial Sequence
  targeting sequence with TTCN PAM
uuuuuaaccccaagagcuca

SEQ ID NO: 3262 - RNA, 20 nt, Artificial Sequence
  targeting sequence with TTCN PAM
aagcuaacuuuaguguucau

SEQ ID NO: 3263 - RNA, 20 nt, Artificial Sequence
  targeting sequence with TTCN PAM
uuuuaggaaacuaaggagaa

SEQ ID NO: 3264 - RNA, 20 nt, Artificial Sequence
  targeting sequence with TTCN PAM
uaaaaugaacacuaaaguua

SEQ ID NO: 3265 - RNA, 20 nt, Artificial Sequence
  targeting sequence with TTCN PAM
ccuuaguuuccuaaaaugaa

SEQ ID NO: 3266 - RNA, 20 nt, Artificial Sequence
  targeting sequence with TTCN PAM
aaauuggguuuuaacagcgc

SEQ ID NO: 3267 - RNA, 20 nt, Artificial Sequence
  targeting sequence with TTCN PAM
ucuucuaaauuggguuuuaa

SEQ ID NO: 3268 - RNA, 20 nt, Artificial Sequence
  targeting sequence with TTCN PAM
ugagacaaaaucuuucucua

SEQ ID NO: 3269 - RNA, 20 nt, Artificial Sequence
  targeting sequence with TTCN PAM
cuauugcccaggcuggagua

SEQ ID NO: 3270 - RNA, 20 nt, Artificial Sequence
  targeting sequence with TTCN PAM
uuuugccacagaguuaaaca

SEQ ID NO: 3271 - RNA, 20 nt, Artificial Sequence
  targeting sequence with TTCN PAM
acugccauacccucccaucu

SEQ ID NO: 3272 - RNA, 20 nt, Artificial Sequence
  targeting sequence with TTCN PAM
ccccaucacucccugccaag

SEQ ID NO: 3273 - RNA, 20 nt, Artificial Sequence
  targeting sequence with TTCN PAM
uugguuucuggaaaggagaa

SEQ ID NO: 3274 - RNA, 20 nt, Artificial Sequence
  targeting sequence with TTCN PAM
ggaaaggagaaaugacagug

SEQ ID NO: 3275 - RNA, 20 nt, Artificial Sequence
  targeting sequence with TTCN PAM
agaaaccaaggaagugccuc

SEQ ID NO: 3276 - RNA, 20 nt, Artificial Sequence
  targeting sequence with TTCN PAM
ccuuuccagaaaccaaggaa

SEQ ID NO: 3277 - RNA, 20 nt, Artificial Sequence
  targeting sequence with TTCN PAM
ugccuucuuaaugagaaagc

SEQ ID NO: 3278 - RNA, 20 nt, Artificial Sequence
  targeting sequence with TTCN PAM
uaaugagaaagcuuucguaa

SEQ ID NO: 3279 - RNA, 20 nt, Artificial Sequence
  targeting sequence with TTCN PAM
uaacaaacugguggcuucuc

SEQ ID NO: 3280 - RNA, 20 nt, Artificial Sequence
  targeting sequence with TTCN PAM
caguguguuugcagcugcuc

SEQ ID NO: 3281 - RNA, 20 nt, Artificial Sequence
  targeting sequence with TTCN PAM
ccuguggcucacggggccug

SEQ ID NO: 3282 - RNA, 20 nt, Artificial Sequence
  targeting sequence with TTCN PAM
caggccccgugagccacagg

SEQ ID NO: 3283 - RNA, 20 nt, Artificial Sequence
  targeting sequence with TTCN PAM
auucuaccaugcugcaacua

SEQ ID NO: 3284 - RNA, 20 nt, Artificial Sequence
  targeting sequence with TTCN PAM
accaugcugcaacuaucccu

SEQ ID NO: 3285 - RNA, 20 nt, Artificial Sequence
  targeting sequence with TTCN PAM
caggcugcgggagggauagu

SEQ ID NO: 3286 - RNA, 20 nt, Artificial Sequence
  targeting sequence with TTCN PAM
aagaacaaauaaaggcccuc

SEQ ID NO: 3287 - RNA, 20 nt, Artificial Sequence
  targeting sequence with TTCN PAM
uggaauccuacccuguuucc

SEQ ID NO: 3288 - RNA, 20 nt, Artificial Sequence
  targeting sequence with TTCN PAM
gcgucagaguuuuuaaagau

SEQ ID NO: 3289 - RNA, 20 nt, Artificial Sequence
  targeting sequence with TTCN PAM
gaaguggggagugcugguug

SEQ ID NO: 3290 - RNA, 20 nt, Artificial Sequence
  targeting sequence with TTCN PAM
gaagccccuaccugccaaau

SEQ ID NO: 3291 - RNA, 20 nt, Artificial Sequence
  targeting sequence with TTCN PAM
gccaucccacccagaaacag

SEQ ID NO: 3292 - RNA, 20 nt, Artificial Sequence
  targeting sequence with TTCN PAM
agcacuagucuuagcuuuua

SEQ ID NO: 3293 - RNA, 20 nt, Artificial Sequence
  targeting sequence with TTCN PAM
gccuaauuuuacccagcucc

SEQ ID NO: 3294 - RNA, 20 nt, Artificial Sequence
  targeting sequence with TTCN PAM
cagaagguuaggcauucuaa

SEQ ID NO: 3295 - RNA, 20 nt, Artificial Sequence
  targeting sequence with TTCN PAM
gggaaugcaggccaguaggu

SEQ ID NO: 3296 - RNA, 20 nt, Artificial Sequence
  targeting sequence with TTCN PAM
aagucacaggaugagauacg

SEQ ID NO: 3297 - RNA, 20 nt, Artificial Sequence
  targeting sequence with TTCN PAM
ugacguuaccguggcauuug

SEQ ID NO: 3298 - RNA, 20 nt, Artificial Sequence
  targeting sequence with TTCN PAM
cuuuuuagaccauauagggu

SEQ ID NO: 3299 - RNA, 20 nt, Artificial Sequence
  targeting sequence with TTCN PAM
ugccuucccuuuuuagacca

SEQ ID NO: 3300 - RNA, 20 nt, Artificial Sequence
  targeting sequence with TTCN PAM
ucaagaaauaacuauaaaaa

SEQ ID NO: 3301 - RNA, 20 nt, Artificial Sequence
  targeting sequence with TTCN PAM
ugaugaaaugcuaaacaaag

SEQ ID NO: 3302 - RNA, 20 nt, Artificial Sequence
  targeting sequence with TTCN PAM
gucuuggagagcugaaguca

SEQ ID NO: 3303 - RNA, 20 nt, Artificial Sequence
  targeting sequence with TTCN PAM
ccaggaccagccaaccuaau

SEQ ID NO: 3304 - RNA, 20 nt, Artificial Sequence
  targeting sequence with TTCN PAM
aaaugucacaugguuuccug

SEQ ID NO: 3305 - RNA, 20 nt, Artificial Sequence
  targeting sequence with TTCN PAM
ugcaggucuaggccuuugca

SEQ ID NO: 3306 - RNA, 20 nt, Artificial Sequence
  targeting sequence with TTCN PAM
ucuuuggagagagacaccaa

SEQ ID NO: 3307 - RNA, 20 nt, Artificial Sequence
  targeting sequence with TTCN PAM
uuggagagagacaccaagug

SEQ ID NO: 3308 - RNA, 20 nt, Artificial Sequence
  targeting sequence with TTCN PAM
ucgacucugcuaagccagag

SEQ ID NO: 3309 - RNA, 20 nt, Artificial Sequence
  targeting sequence with TTCN PAM
gagcacaugcucacggccac

SEQ ID NO: 3310 - RNA, 20 nt, Artificial Sequence
  targeting sequence with TTCN PAM
auucccagcucuacuucuug

SEQ ID NO: 3311 - RNA, 20 nt, Artificial Sequence
  targeting sequence with TTCN PAM
cagcucuacuucuuguuaaa

SEQ ID NO: 3312 - RNA, 20 nt, Artificial Sequence
  targeting sequence with TTCN PAM
uguuaaagcuauguccacuu

SEQ ID NO: 3313 - RNA, 20 nt, Artificial Sequence
  targeting sequence with TTCN PAM
gagaucaugcugccuuauua

SEQ ID NO: 3314 - RNA, 20 nt, Artificial Sequence
  targeting sequence with TTCN PAM
agaccugacuaagauguccc

SEQ ID NO: 3315 - RNA, 20 nt, Artificial Sequence
  targeting sequence with TTCN PAM
cucuucaagaccugacuaag

SEQ ID NO: 3316 - RNA, 20 nt, Artificial Sequence
  targeting sequence with TTCN PAM
cuggauaaggaggagggaaa

SEQ ID NO: 3317 - RNA, 20 nt, Artificial Sequence
  targeting sequence with TTCN PAM
cuccuccuuauccagagaac

SEQ ID NO: 3318 - RNA, 20 nt, Artificial Sequence
  targeting sequence with TTCN PAM
gggcaggaggaacaacgugu

SEQ ID NO: 3319 - RNA, 20 nt, Artificial Sequence
  targeting sequence with TTCN PAM
uccugcccagaaugccuuuc

SEQ ID NO: 3320 - RNA, 20 nt, Artificial Sequence
  targeting sequence with TTCN PAM
aaaaguugacuuuuuauuga

SEQ ID NO: 3321 - RNA, 20 nt, Artificial Sequence
  targeting sequence with TTCN PAM
auaaaaagucaacuuuuuga

SEQ ID NO: 3322 - RNA, 20 nt, Artificial Sequence
  targeting sequence with TTCN PAM
ucuacagaugcuuuuggauu

SEQ ID NO: 3323 - RNA, 20 nt, Artificial Sequence
  targeting sequence with TTCN PAM
uccuguuuuuauuuauuuuc

SEQ ID NO: 3324 - RNA, 20 nt, Artificial Sequence
  targeting sequence with TTCN PAM
uguuuuuauuuauuuuccuu

SEQ ID NO: 3325 - RNA, 20 nt, Artificial Sequence
  targeting sequence with TTCN PAM
uuaccuuauugcacuagcga

SEQ ID NO: 3326 - RNA, 20 nt, Artificial Sequence
  targeting sequence with TTCN PAM
ucaucucagugggaaaacuu

SEQ ID NO: 3327 - RNA, 20 nt, Artificial Sequence
  targeting sequence with TTCN PAM
cacugagaugaggaaagaga

SEQ ID NO: 3328 - RNA, 20 nt, Artificial Sequence
  targeting sequence with TTCN PAM
auauuucacuauuaauuaaa

SEQ ID NO: 3329 - RNA, 20 nt, Artificial Sequence
  targeting sequence with TTCN PAM
cuauuaauuaaaauauuugc

SEQ ID NO: 3330 - RNA, 20 nt, Artificial Sequence
  targeting sequence with TTCN PAM
guguuuaggcauuguccacc

SEQ ID NO: 3331 - RNA, 20 nt, Artificial Sequence
  targeting sequence with TTCN PAM
ggccaugguuggugaaacua

SEQ ID NO: 3332 - RNA, 20 nt, Artificial Sequence
  targeting sequence with TTCN PAM
ccaaccauggccagaaaccu

SEQ ID NO: 3333 - RNA, 20 nt, Artificial Sequence
  targeting sequence with TTCN PAM
cauauggaggugccuaaccg

SEQ ID NO: 3334 - RNA, 20 nt, Artificial Sequence
  targeting sequence with TTCN PAM
cucgguaccuggguguaauc

SEQ ID NO: 3335 - RNA, 20 nt, Artificial Sequence
  targeting sequence with TTCN PAM
cuccagagccuacuaugagc

SEQ ID NO: 3336 - RNA, 20 nt, Artificial Sequence
  targeting sequence with TTCN PAM
aagaagggagccugguuaau

SEQ ID NO: 3337 - RNA, 20 nt, Artificial Sequence
  targeting sequence with TTCN PAM
uagaacagcagcacaaaagc

SEQ ID NO: 3338 - RNA, 20 nt, Artificial Sequence
  targeting sequence with TTCN PAM
ccagacuccaaagagugcug

SEQ ID NO: 3339 - RNA, 20 nt, Artificial Sequence
  targeting sequence with TTCN PAM
aagcuauuggaucuuuguuu

SEQ ID NO: 3340 - RNA, 20 nt, Artificial Sequence
  targeting sequence with TTCN PAM
cacagcaauacaaagacaug

SEQ ID NO: 3341 - RNA, 20 nt, Artificial Sequence
  targeting sequence with TTCN PAM
cauuucucacagcaauacaa

SEQ ID NO: 3342 - RNA, 20 nt, Artificial Sequence
  targeting sequence with TTCN PAM
ucuucaaagauuauaaaaag

SEQ ID NO: 3343 - RNA, 20 nt, Artificial Sequence
  targeting sequence with TTCN PAM
ucaaagauuauaaaaaguca

SEQ ID NO: 3344 - RNA, 20 nt, Artificial Sequence
  targeting sequence with TTCN PAM
aagauuauaaaaagucauaa

SEQ ID NO: 3345 - RNA, 20 nt, Artificial Sequence
  targeting sequence with TTCN PAM
ucuuauaacacuguuaacca

SEQ ID NO: 3346 - RNA, 20 nt, Artificial Sequence
  targeting sequence with TTCN PAM
uauaacacuguuaaccacua

SEQ ID NO: 3347 - RNA, 20 nt, Artificial Sequence
  targeting sequence with TTCN PAM
uccuuaacuaucccuagaua

SEQ ID NO: 3348 - RNA, 20 nt, Artificial Sequence
  targeting sequence with TTCN PAM
uuaacuaucccuagauaacu

SEQ ID NO: 3349 - RNA, 20 nt, Artificial Sequence
  targeting sequence with TTCN PAM
uuuucuuucuuuguucuguu

SEQ ID NO: 3350 - RNA, 20 nt, Artificial Sequence
  targeting sequence with TTCN PAM
uucuuuguucuguuccccuu

SEQ ID NO: 3351 - RNA, 20 nt, Artificial Sequence
  targeting sequence with TTCN PAM
uuguucuguuccccuuaccu

SEQ ID NO: 3352 - RNA, 20 nt, Artificial Sequence
  targeting sequence with TTCN PAM
guuccccuuaccuaauuaag

SEQ ID NO: 3353 - RNA, 20 nt, Artificial Sequence
  targeting sequence with TTCN PAM
ccuuaccuaauuaagaaagu

SEQ ID NO: 3354 - RNA, 20 nt, Artificial Sequence
  targeting sequence with TTCN PAM
uaauuagguaaggggaacag

SEQ ID NO: 3355 - RNA, 20 nt, Artificial Sequence
  targeting sequence with TTCN PAM
uuuuauaaauuacucacauu

SEQ ID NO: 3356 - RNA, 20 nt, Artificial Sequence
  targeting sequence with TTCN PAM
gccuaguaauuuuggggguc

SEQ ID NO: 3357 - RNA, 20 nt, Artificial Sequence
  targeting sequence with TTCN PAM
cuucagccuaguaauuuugg

SEQ ID NO: 3358 - RNA, 20 nt, Artificial Sequence
  targeting sequence with TTCN PAM
auucaaagucucacuaagau

SEQ ID NO: 3359 - RNA, 20 nt, Artificial Sequence
  targeting sequence with TTCN PAM
aagucucacuaagauaaaug

SEQ ID NO: 3360 - RNA, 20 nt, Artificial Sequence
  targeting sequence with TTCN PAM
aaaggaggcaguuagauaug

SEQ ID NO: 3361 - RNA, 20 nt, Artificial Sequence
  targeting sequence with TTCN PAM
ugccuuuccagacagaacca

SEQ ID NO: 3362 - RNA, 20 nt, Artificial Sequence
  targeting sequence with TTCN PAM
agacagaaccaauguucauu

SEQ ID NO: 3363 - RNA, 20 nt, Artificial Sequence
  targeting sequence with TTCN PAM
gucuggaaaggcaggaaaac

SEQ ID NO: 3364 - RNA, 20 nt, Artificial Sequence
  targeting sequence with TTCN PAM
uuuuacauauguuaauuaau

SEQ ID NO: 3365 - RNA, 20 nt, Artificial Sequence
  targeting sequence with TTCN PAM
cuuuuaacaagggaggcaug

SEQ ID NO: 3366 - RNA, 20 nt, Artificial Sequence
  targeting sequence with TTCN PAM
uucacuuuuaacaagggagg

SEQ ID NO: 3367 - RNA, 20 nt, Artificial Sequence
  targeting sequence with TTCN PAM
guacucaauucuuucacuuu

SEQ ID NO: 3368 - RNA, 20 nt, Artificial Sequence
  targeting sequence with TTCN PAM
acaauuuuagaaacauauuu

SEQ ID NO: 3369 - RNA, 20 nt, Artificial Sequence
  targeting sequence with TTCN PAM
uaucuauaaaugcccauauc

SEQ ID NO: 3370 - RNA, 20 nt, Artificial Sequence
  targeting sequence with TTCN PAM
ggauuucuugcuuuuuaggg

SEQ ID NO: 3371 - RNA, 20 nt, Artificial Sequence
  targeting sequence with TTCN PAM
ugcuuuuuaggguuucacua

SEQ ID NO: 3372 - RNA, 20 nt, Artificial Sequence
  targeting sequence with TTCN PAM
cuaaaauuuuagcauaagaa

SEQ ID NO: 3373 - RNA, 20 nt, Artificial Sequence
  targeting sequence with TTCN PAM
uaugcuaaaauuuuagugaa

SEQ ID NO: 3374 - RNA, 20 nt, Artificial Sequence
  targeting sequence with TTCN PAM
guguacaaaaugugcccaaa

SEQ ID NO: 3375 - RNA, 20 nt, Artificial Sequence
  targeting sequence with TTCN PAM
cacuaauaacccuuuugggc

SEQ ID NO: 3376 - RNA, 20 nt, Artificial Sequence
  targeting sequence with TTCN PAM
uuuucucacuaauaacccuu

SEQ ID NO: 3377 - RNA, 20 nt, Artificial Sequence
  targeting sequence with TTCN PAM
gaaguuauccaaaaguuagu

SEQ ID NO: 3378 - RNA, 20 nt, Artificial Sequence
  targeting sequence with TTCN PAM
gaauuagacaaaauuauucu

SEQ ID NO: 3379 - RNA, 20 nt, Artificial Sequence
  targeting sequence with TTCN PAM
aauuacagauuugaaaaggu

SEQ ID NO: 3380 - RNA, 20 nt, Artificial Sequence
  targeting sequence with TTCN PAM
aaucuguaauuugaacuaac

SEQ ID NO: 3381 - RNA, 20 nt, Artificial Sequence
  targeting sequence with TTCN PAM
uaaauaaccuuuucaaaucu

SEQ ID NO: 3382 - RNA, 20 nt, Artificial Sequence
  targeting sequence with TTCN PAM
uuacuacauuguuucauaaa

SEQ ID NO: 3383 - RNA, 20 nt, Artificial Sequence
  targeting sequence with TTCN PAM
ccccuacuacuuaaugguuc

SEQ ID NO: 3384 - RNA, 20 nt, Artificial Sequence
  targeting sequence with TTCN PAM
acauuuuucuccccuacuac

SEQ ID NO: 3385 - RNA, 20 nt, Artificial Sequence
  targeting sequence with TTCN PAM
uuaaaaccugauaaagaauu

SEQ ID NO: 3386 - RNA, 20 nt, Artificial Sequence
  targeting sequence with TTCN PAM
uuaucagguuuuaaagaaua

SEQ ID NO: 3387 - RNA, 20 nt, Artificial Sequence
  targeting sequence with TTCN PAM
uauuuuauuuuaaucaagac

SEQ ID NO: 3388 - RNA, 20 nt, Artificial Sequence
  targeting sequence with TTCN PAM
acaguaaauuaaguagaaaa

SEQ ID NO: 3389 - RNA, 20 nt, Artificial Sequence
  targeting sequence with TTCN PAM
acuuaauuuacuguggaagc

SEQ ID NO: 3390 - RNA, 20 nt, Artificial Sequence
  targeting sequence with TTCN PAM
uguuuauuaauuuuugcauc

SEQ ID NO: 3391 - RNA, 20 nt, Artificial Sequence
  targeting sequence with TTCN PAM
uuuguuugcuguuuauucuc

SEQ ID NO: 3392 - RNA, 20 nt, Artificial Sequence
  targeting sequence with TTCN PAM
cugcuagauuuuguuuaugu

SEQ ID NO: 3393 - RNA, 20 nt, Artificial Sequence
  targeting sequence with TTCN PAM
ucaucuuggccaggcugguu

SEQ ID NO: 3394 - RNA, 20 nt, Artificial Sequence
  targeting sequence with TTCN PAM
cugccucagccucccaagua

SEQ ID NO: 3395 - RNA, 20 nt, Artificial Sequence
  targeting sequence with TTCN PAM
agcuguucucugccucagcc

SEQ ID NO: 3396 - RNA, 20 nt, Artificial Sequence
  targeting sequence with TTCN PAM
agauagaugaaacaaaggau

SEQ ID NO: 3397 - RNA, 20 nt, Artificial Sequence
  targeting sequence with TTCN PAM
uaagcuaccuuugucagguc

SEQ ID NO: 3398 - RNA, 20 nt, Artificial Sequence
  targeting sequence with TTCN PAM
ugcggaccugacaaagguag

SEQ ID NO: 3399 - RNA, 20 nt, Artificial Sequence
  targeting sequence with TTCN PAM
ugauacguuaaguguguuga

SEQ ID NO: 3400 - RNA, 20 nt, Artificial Sequence
  targeting sequence with TTCN PAM
gggcucucucucccugagua

SEQ ID NO: 3401 - RNA, 20 nt, Artificial Sequence
  targeting sequence with TTCN PAM
uacccuuuugcuggcaugcc

SEQ ID NO: 3402 - RNA, 20 nt, Artificial Sequence
  targeting sequence with TTCN PAM
uaccagucagucucuggucu

SEQ ID NO: 3403 - RNA, 20 nt, Artificial Sequence
  targeting sequence with TTCN PAM
cucugugcaaacugguuaaa

SEQ ID NO: 3404 - RNA, 20 nt, Artificial Sequence
  targeting sequence with TTCN PAM
gacaaaauauuuuauuuaag

SEQ ID NO: 3405 - RNA, 20 nt, Artificial Sequence
  targeting sequence with TTCN PAM
ugugacgugaguaauucuug

SEQ ID NO: 3406 - RNA, 20 nt, Artificial Sequence
  targeting sequence with TTCN PAM
ugggaaauaaagaugauuuu

SEQ ID NO: 3407 - RNA, 20 nt, Artificial Sequence
  targeting sequence with TTCN PAM
caagaauuacucacgucaca

SEQ ID NO: 3408 - RNA, 20 nt, Artificial Sequence
  targeting sequence with TTCN PAM
acuaauaaucauuaaaauca

SEQ ID NO: 3409 - RNA, 20 nt, Artificial Sequence
  targeting sequence with TTCN PAM
aaauguaaauauguggucca

SEQ ID NO: 3410 - RNA, 20 nt, Artificial Sequence
  targeting sequence with TTCN PAM
aauauuagguuugcuauaug

SEQ ID NO: 3411 - RNA, 20 nt, Artificial Sequence
  targeting sequence with TTCN PAM
uuggcuuuugaaaauuguuu

SEQ ID NO: 3412 - RNA, 20 nt, Artificial Sequence
  targeting sequence with TTCN PAM
aaagccaaagaagcagcuua

SEQ ID NO: 3413 - RNA, 20 nt, Artificial Sequence
  targeting sequence with TTCN PAM
gguugauaaaagcuuuccca

SEQ ID NO: 3414 - RNA, 20 nt, Artificial Sequence
  targeting sequence with TTCN PAM
caugcaagagggcugauguu

SEQ ID NO: 3415 - RNA, 20 nt, Artificial Sequence
  targeting sequence with TTCN PAM
cuggguaaagaaagcuuuuu

SEQ ID NO: 3416 - RNA, 20 nt, Artificial Sequence
  targeting sequence with TTCN PAM
uuacccagugaaaacacacu

SEQ ID NO: 3417 - RNA, 20 nt, Artificial Sequence
  targeting sequence with TTCN PAM
uuguuaauccacuacaacug

SEQ ID NO: 3418 - RNA, 20 nt, Artificial Sequence
  targeting sequence with TTCN PAM
uuaagucaaccuuugaucua

SEQ ID NO: 3419 - RNA, 20 nt, Artificial Sequence
  targeting sequence with TTCN PAM
uacccaagguacccauaaac

SEQ ID NO: 3420 - RNA, 20 nt, Artificial Sequence
  targeting sequence with TTCN PAM
gaguaugcuucuuacccaag

SEQ ID NO: 3421 - RNA, 20 nt, Artificial Sequence
  targeting sequence with TTCN PAM
ugguauuauccucccaauag

SEQ ID NO: 3422 - RNA, 20 nt, Artificial Sequence
  targeting sequence with TTCN PAM
cucaaagguuuuaaaugcuu

SEQ ID NO: 3423 - RNA, 20 nt, Artificial Sequence
  targeting sequence with TTCN PAM
uuaaagucuuagcacaagug

SEQ ID NO: 3424 - RNA, 20 nt, Artificial Sequence
  targeting sequence with TTCN PAM
agaacagaccagguuuuguu

SEQ ID NO: 3425 - RNA, 20 nt, Artificial Sequence
  targeting sequence with TTCN PAM
agaaucuguguuuccuuaaa

SEQ ID NO: 3426 - RNA, 20 nt, Artificial Sequence
  targeting sequence with TTCN PAM
ccugcaaaucucuauagcaa

SEQ ID NO: 3427 - RNA, 20 nt, Artificial Sequence
  targeting sequence with TTCN PAM
ugacaacagagguauccacc

SEQ ID NO: 3428 - RNA, 20 nt, Artificial Sequence
  targeting sequence with TTCN PAM
ggggguggauaccucuguug

SEQ ID NO: 3429 - RNA, 20 nt, Artificial Sequence
  targeting sequence with TTCN PAM
cauuaaaucuuuuagccaaa

SEQ ID NO: 3430 - RNA, 20 nt, Artificial Sequence
  targeting sequence with TTCN PAM
uuucuucucuccuagagacc

SEQ ID NO: 3431 - RNA, 20 nt, Artificial Sequence
  targeting sequence with TTCN PAM
ucucuccuagagaccaccaa

SEQ ID NO: 3432 - RNA, 20 nt, Artificial Sequence
  targeting sequence with TTCN PAM
cuccuagagaccaccaaguu

SEQ ID NO: 3433 - RNA, 20 nt, Artificial Sequence
  targeting sequence with TTCN PAM
ugggaggcagagggaccaau

SEQ ID NO: 3434 - RNA, 20 nt, Artificial Sequence
  targeting sequence with TTCN PAM
ucuguaagagaugugauccc

SEQ ID NO: 3435 - RNA, 20 nt, Artificial Sequence
  targeting sequence with TTCN PAM
ugccucauuuccucuguaag

SEQ ID NO: 3436 - RNA, 20 nt, Artificial Sequence
  targeting sequence with TTCN PAM
cugccuccagacccuauuuu

SEQ ID NO: 3437 - RNA, 20 nt, Artificial Sequence
  targeting sequence with TTCN PAM
cgcuucagcuaugacaggaa

SEQ ID NO: 3438 - RNA, 20 nt, Artificial Sequence
  targeting sequence with TTCN PAM
gcuaugacaggaaauauccu

SEQ ID NO: 3439 - RNA, 20 nt, Artificial Sequence
  targeting sequence with TTCN PAM
uugucaauaaaauuucuuca

SEQ ID NO: 3440 - RNA, 20 nt, Artificial Sequence
  targeting sequence with TTCN PAM
ucauucuuucuucacuuugu

SEQ ID NO: 3441 - RNA, 20 nt, Artificial Sequence
  targeting sequence with TTCN PAM
uucuuucuucacuuuguuug

SEQ ID NO: 3442 - RNA, 20 nt, Artificial Sequence
  targeting sequence with TTCN PAM
uucuucacuuuguuugugug

SEQ ID NO: 3443 - RNA, 20 nt, Artificial Sequence
  targeting sequence with TTCN PAM
ucacuuuguuuguguguuuu

SEQ ID NO: 3444 - RNA, 20 nt, Artificial Sequence
  targeting sequence with TTCN PAM
cuuuguuuguguguuuuguc

SEQ ID NO: 3445 - RNA, 20 nt, Artificial Sequence
  targeting sequence with TTCN PAM
uuguucaagaugccaaggac

SEQ ID NO: 3446 - RNA, 20 nt, Artificial Sequence
  targeting sequence with TTCN PAM
agaugccaaggaccuggaca

SEQ ID NO: 3447 - RNA, 20 nt, Artificial Sequence
  targeting sequence with TTCN PAM
uuaagggguuuagauggugc

SEQ ID NO: 3448 - RNA, 20 nt, Artificial Sequence
  targeting sequence with TTCN PAM
gcccucugaggcugugcacc

SEQ ID NO: 3449 - RNA, 20 nt, Artificial Sequence
  targeting sequence with TTCN PAM
agaaacagcucucaacacca

SEQ ID NO: 3450 - RNA, 20 nt, Artificial Sequence
  targeting sequence with TTCN PAM
agaagcucagccuagugucu

SEQ ID NO: 3451 - RNA, 20 nt, Artificial Sequence
  targeting sequence with TTCN PAM
uccccuuucguucugccucg

SEQ ID NO: 3452 - RNA, 20 nt, Artificial Sequence
  targeting sequence with TTCN PAM
ccuuucguucugccucgaau

SEQ ID NO: 3453 - RNA, 20 nt, Artificial Sequence
  targeting sequence with TTCN PAM
uucugccucgaaugucugga

SEQ ID NO: 3454 - RNA, 20 nt, Artificial Sequence
  targeting sequence with TTCN PAM
gccucgaaugucuggagcug

SEQ ID NO: 3455 - RNA, 20 nt, Artificial Sequence
  targeting sequence with TTCN PAM
aggcagaacgaaaggggaag

SEQ ID NO: 3456 - RNA, 20 nt, Artificial Sequence
  targeting sequence with TTCN PAM
uccucacgcugacacgaugg

SEQ ID NO: 3457 - RNA, 20 nt, Artificial Sequence
  targeting sequence with TTCN PAM
uuggccuuucauccucacgc

SEQ ID NO: 3458 - RNA, 20 nt, Artificial Sequence
  targeting sequence with TTCN PAM
caaauagacuuuuaagucuu

SEQ ID NO: 3459 - RNA, 20 nt, Artificial Sequence
  targeting sequence with TTCN PAM
auauccccucuugaagcuga

SEQ ID NO: 3460 - RNA, 20 nt, Artificial Sequence
  targeting sequence with TTCN PAM
agaggggauauggaagacuu

SEQ ID NO: 3461 - RNA, 20 nt, Artificial Sequence
  targeting sequence with TTCN PAM
gcuucaagaggggauaugga

SEQ ID NO: 3462 - RNA, 20 nt, Artificial Sequence
  targeting sequence with TTCN PAM
auaagaacaaacaacgcugc

SEQ ID NO: 3463 - RNA, 20 nt, Artificial Sequence
  targeting sequence with TTCN PAM
uauggaaauuucagcuucaa

SEQ ID NO: 3464 - RNA, 20 nt, Artificial Sequence
  targeting sequence with TTCN PAM
cuggggcagaggggagcuuu

SEQ ID NO: 3465 - RNA, 20 nt, Artificial Sequence
  targeting sequence with TTCN PAM
aggagucuaagaagaggggc

SEQ ID NO: 3466 - RNA, 20 nt, Artificial Sequence
  targeting sequence with TTCN PAM
uagacuccuagaaagcuccc

SEQ ID NO: 3467 - RNA, 20 nt, Artificial Sequence
  targeting sequence with TTCN PAM
gagcccaaucagggggucag

SEQ ID NO: 3468 - RNA, 20 nt, Artificial Sequence
  targeting sequence with TTCN PAM
ccacugacccccugauuggg

SEQ ID NO: 3469 - RNA, 20 nt, Artificial Sequence
  targeting sequence with TTCN PAM
cagccgugcucucagagauc

SEQ ID NO: 3470 - RNA, 20 nt, Artificial Sequence
  targeting sequence with TTCN PAM
ucuaauucucagccgugcuc

SEQ ID NO: 3471 - RNA, 20 nt, Artificial Sequence
  targeting sequence with TTCN PAM
aacagucagcggcaugguga

SEQ ID NO: 3472 - RNA, 20 nt, Artificial Sequence
  targeting sequence with TTCN PAM
aacguuuccucuaauucuca

SEQ ID NO: 3473 - RNA, 20 nt, Artificial Sequence
  targeting sequence with TTCN PAM
ugaggagguguucccaaauc

SEQ ID NO: 3474 - RNA, 20 nt, Artificial Sequence
  targeting sequence with TTCN PAM
cacugcugccaagccauccc

SEQ ID NO: 3475 - RNA, 20 nt, Artificial Sequence
  targeting sequence with TTCN PAM
acugccaugucccuugccca

SEQ ID NO: 3476 - RNA, 20 nt, Artificial Sequence
  targeting sequence with TTCN PAM
uuccacugccaugucccuug

SEQ ID NO: 3477 - RNA, 20 nt, Artificial Sequence
  targeting sequence with TTCN PAM
ugguauauugguuucacucu

SEQ ID NO: 3478 - RNA, 20 nt, Artificial Sequence
  targeting sequence with TTCN PAM
ggugagaauucugaugguau

SEQ ID NO: 3479 - RNA, 20 nt, Artificial Sequence
  targeting sequence with TTCN PAM
caccugaaguuuuguguuuu

SEQ ID NO: 3480 - RNA, 20 nt, Artificial Sequence
  targeting sequence with TTCN PAM
gaugguauugagucaaggua

SEQ ID NO: 3481 - RNA, 20 nt, Artificial Sequence
  targeting sequence with TTCN PAM
agcgauucuuuugccucagc

SEQ ID NO: 3482 - RNA, 20 nt, Artificial Sequence
  targeting sequence with TTCN PAM
uuugccucagccuccugagu

SEQ ID NO: 3483 - RNA, 20 nt, Artificial Sequence
  targeting sequence with TTCN PAM
uauuguguagaaacccuuag

SEQ ID NO: 3484 - RNA, 20 nt, Artificial Sequence
  targeting sequence with TTCN PAM
acacaauaugaagccuuaua

SEQ ID NO: 3485 - RNA, 20 nt, Artificial Sequence
  targeting sequence with TTCN PAM
cagcccaccuaaaaagccca

SEQ ID NO: 3486 - RNA, 20 nt, Artificial Sequence
  targeting sequence with TTCN PAM
auuauuuuaaauauaaaaau

SEQ ID NO: 3487 - RNA, 20 nt, Artificial Sequence
  targeting sequence with TTCN PAM
ccagcucugggaagccacag

SEQ ID NO: 3488 - RNA, 20 nt, Artificial Sequence
  targeting sequence with TTCN PAM
cagagcuggagaaaacuugg

SEQ ID NO: 3489 - RNA, 20 nt, Artificial Sequence
  targeting sequence with TTCN PAM
aaagaacaaucuggaagcuu

SEQ ID NO: 3490 - RNA, 20 nt, Artificial Sequence
  targeting sequence with TTCN PAM
uuggaacauuuggagguccc

SEQ ID NO: 3491 - RNA, 20 nt, Artificial Sequence
  targeting sequence with TTCN PAM
agauuguucuuuggaacauu

SEQ ID NO: 3492 - RNA, 20 nt, Artificial Sequence
  targeting sequence with TTCN PAM
acagugauugagaggagaca

SEQ ID NO: 3493 - RNA, 20 nt, Artificial Sequence
  targeting sequence with TTCN PAM
ggccugucaccauacuuggg

SEQ ID NO: 3494 - RNA, 20 nt, Artificial Sequence
  targeting sequence with TTCN PAM
aguucugagacucuaugcug

SEQ ID NO: 3495 - RNA, 20 nt, Artificial Sequence
  targeting sequence with TTCN PAM
cgaucuguaaaaagucggau

SEQ ID NO: 3496 - RNA, 20 nt, Artificial Sequence
  targeting sequence with TTCN PAM
agggcugcccucccagaaca

SEQ ID NO: 3497 - RNA, 20 nt, Artificial Sequence
  targeting sequence with TTCN PAM
gggagggcagcccuggaacu

SEQ ID NO: 3498 - RNA, 20 nt, Artificial Sequence
  targeting sequence with TTCN PAM
gcggcugcuguucugggagg

SEQ ID NO: 3499 - RNA, 20 nt, Artificial Sequence
  targeting sequence with TTCN PAM
aaggaaggcaaagccuugag

SEQ ID NO: 3500 - RNA, 20 nt, Artificial Sequence
  targeting sequence with TTCN PAM
uuggaauacauuuuuugccc

SEQ ID NO: 3501 - RNA, 20 nt, Artificial Sequence
  targeting sequence with TTCN PAM
aauccauuucuuacccacag

SEQ ID NO: 3502 - RNA, 20 nt, Artificial Sequence
  targeting sequence with TTCN PAM
uacccacagacugucauuuc

SEQ ID NO: 3503 - RNA, 20 nt, Artificial Sequence
  targeting sequence with TTCN PAM
uuuuuuagagcauaaacuca

SEQ ID NO: 3504 - RNA, 20 nt, Artificial Sequence
  targeting sequence with TTCN PAM
cuccaugaauaggcugucuc

SEQ ID NO: 3505 - RNA, 20 nt, Artificial Sequence
  targeting sequence with TTCN PAM
uggagagaaguagcugcguc

SEQ ID NO: 3506 - RNA, 20 nt, Artificial Sequence
  targeting sequence with TTCN PAM
gugccugggagacagccuau

SEQ ID NO: 3507 - RNA, 20 nt, Artificial Sequence
  targeting sequence with TTCN PAM
aggaaccagcagggccuuuc

SEQ ID NO: 3508 - RNA, 20 nt, Artificial Sequence
  targeting sequence with TTCN PAM
uggaauucugugccugggag

SEQ ID NO: 3509 - RNA, 20 nt, Artificial Sequence
  targeting sequence with TTCN PAM
agguugguuucaagggaaga

SEQ ID NO: 3510 - RNA, 20 nt, Artificial Sequence
  targeting sequence with TTCN PAM
agggaagagugugucccuug

SEQ ID NO: 3511 - RNA, 20 nt, Artificial Sequence
  targeting sequence with TTCN PAM
cuugaaaccaaccuugaaag

SEQ ID NO: 3512 - RNA, 20 nt, Artificial Sequence
  targeting sequence with TTCN PAM
ggcucuuggagcuggcucca

SEQ ID NO: 3513 - RNA, 20 nt, Artificial Sequence
  targeting sequence with TTCN PAM
uguuggguccagaguugcau

SEQ ID NO: 3514 - RNA, 20 nt, Artificial Sequence
  targeting sequence with TTCN PAM
gugaucuugguuauuugaau

SEQ ID NO: 3515 - RNA, 20 nt, Artificial Sequence
  targeting sequence with TTCN PAM
aauaaccaagaucacagaac

SEQ ID NO: 3516 - RNA, 20 nt, Artificial Sequence
  targeting sequence with TTCN PAM
cugagccucaguuuccucaa

SEQ ID NO: 3517 - RNA, 20 nt, Artificial Sequence
  targeting sequence with TTCN PAM
ucaauccuuagguggaaaua

SEQ ID NO: 3518 - RNA, 20 nt, Artificial Sequence
  targeting sequence with TTCN PAM
accuaaggauugaggaaacu

SEQ ID NO: 3519 - RNA, 20 nt, Artificial Sequence
  targeting sequence with TTCN PAM
uaccuuauccagaaucaguu

SEQ ID NO: 3520 - RNA, 20 nt, Artificial Sequence
  targeting sequence with TTCN PAM
ucuacagaauuccucuugcc

SEQ ID NO: 3521 - RNA, 20 nt, Artificial Sequence
  targeting sequence with TTCN PAM
uucuaacaucguagcacaaa

SEQ ID NO: 3522 - RNA, 20 nt, Artificial Sequence
  targeting sequence with TTCN PAM
aacaucguagcacaaaagua

SEQ ID NO: 3523 - RNA, 20 nt, Artificial Sequence
  targeting sequence with TTCN PAM
uuacauacuacuuuugugcu

SEQ ID NO: 3524 - RNA, 20 nt, Artificial Sequence
  targeting sequence with TTCN PAM
aauaaaacuuuuuagaggcu

SEQ ID NO: 3525 - RNA, 20 nt, Artificial Sequence
  targeting sequence with TTCN PAM
gauuugcuacgugacuucag

SEQ ID NO: 3526 - RNA, 20 nt, Artificial Sequence
  targeting sequence with TTCN PAM
ggcaacucacuuuccuuuuc

SEQ ID NO: 3527 - RNA, 20 nt, Artificial Sequence
  targeting sequence with TTCN PAM
uuuucugggccuauaaauca

SEQ ID NO: 3528 - RNA, 20 nt, Artificial Sequence
  targeting sequence with TTCN PAM
gggccuauaaaucaaagcag

SEQ ID NO: 3529 - RNA, 20 nt, Artificial Sequence
  targeting sequence with TTCN PAM
uuguugggggugcuguccug

SEQ ID NO: 3530 - RNA, 20 nt, Artificial Sequence
  targeting sequence with TTCN PAM
aguagcaaccuacaaugcac

SEQ ID NO: 3531 - RNA, 20 nt, Artificial Sequence
  targeting sequence with TTCN PAM
cuacccgcuugaggcagaag

SEQ ID NO: 3532 - RNA, 20 nt, Artificial Sequence
  targeting sequence with TTCN PAM
gccucaagcggguagggaag

SEQ ID NO: 3533 - RNA, 20 nt, Artificial Sequence
  targeting sequence with TTCN PAM
ucugagucgcccagccgagc

SEQ ID NO: 3534 - RNA, 20 nt, Artificial Sequence
  targeting sequence with TTCN PAM
gagucgcccagccgagccag

SEQ ID NO: 3535 - RNA, 20 nt, Artificial Sequence
  targeting sequence with TTCN PAM
cuggcucggcugggcgacuc

SEQ ID NO: 3536 - RNA, 20 nt, Artificial Sequence
  targeting sequence with TTCN PAM
gagugugcuuguuuagagag

SEQ ID NO: 3537 - RNA, 20 nt, Artificial Sequence
  targeting sequence with TTCN PAM
caaauagagccauuguguca

SEQ ID NO: 3538 - RNA, 20 nt, Artificial Sequence
  targeting sequence with TTCN PAM
agggccugagcuuccagccu

SEQ ID NO: 3539 - RNA, 20 nt, Artificial Sequence
  targeting sequence with TTCN PAM
agccuggcccagggauucag

SEQ ID NO: 3540 - RNA, 20 nt, Artificial Sequence
  targeting sequence with TTCN PAM
gguugaagcagggcccgagg

SEQ ID NO: 3541 - RNA, 20 nt, Artificial Sequence
  targeting sequence with TTCN PAM
accugaaucccugggccagg

SEQ ID NO: 3542 - RNA, 20 nt, Artificial Sequence
  targeting sequence with TTCN PAM
acccaccuggggcagggcca

SEQ ID NO: 3543 - RNA, 20 nt, Artificial Sequence
  targeting sequence with TTCN PAM
cccuccuuuacgggcacuca

SEQ ID NO: 3544 - RNA, 20 nt, Artificial Sequence
  targeting sequence with TTCN PAM
uaagcagcuaggauuacaag

SEQ ID NO: 3545 - RNA, 20 nt, Artificial Sequence
  targeting sequence with TTCN PAM
ccugccucagcuuccuaagc

SEQ ID NO: 3546 - RNA, 20 nt, Artificial Sequence
  targeting sequence with TTCN PAM
agugauucuccugccucagc

SEQ ID NO: 3547 - RNA, 20 nt, Artificial Sequence
  targeting sequence with TTCN PAM
uuauuauuauaggucaggga

SEQ ID NO: 3548 - RNA, 20 nt, Artificial Sequence
  targeting sequence with TTCN PAM
auugugcagugguuguuuuc

SEQ ID NO: 3549 - RNA, 20 nt, Artificial Sequence
  targeting sequence with TTCN PAM
uccaguggacauugaccuuc

SEQ ID NO: 3550 - RNA, 20 nt, Artificial Sequence
  targeting sequence with TTCN PAM
ccaccccaaccgucccccag

SEQ ID NO: 3551 - RNA, 20 nt, Artificial Sequence
  targeting sequence with TTCN PAM
auguggaucccccacagcag

SEQ ID NO: 3552 - RNA, 20 nt, Artificial Sequence
  targeting sequence with TTCN PAM
cacauggggucggggucauu

SEQ ID NO: 3553 - RNA, 20 nt, Artificial Sequence
  targeting sequence with TTCN PAM
cagcuuaacuccucccgggc

SEQ ID NO: 3554 - RNA, 20 nt, Artificial Sequence
  targeting sequence with TTCN PAM
aaaaacaaaacacacaagca

SEQ ID NO: 3555 - RNA, 20 nt, Artificial Sequence
  targeting sequence with TTCN PAM
cagaagcagguuucuccucu

SEQ ID NO: 3556 - RNA, 20 nt, Artificial Sequence
  targeting sequence with TTCN PAM
gggaaaaaaaauucaaaaaa

SEQ ID NO: 3557 - RNA, 20 nt, Artificial Sequence
  targeting sequence with TTCN PAM
ccucuugacagccucuccua

SEQ ID NO: 3558 - RNA, 20 nt, Artificial Sequence
  targeting sequence with TTCN PAM
uguagggagcaaaaaauucu

SEQ ID NO: 3559 - RNA, 20 nt, Artificial Sequence
  targeting sequence with TTCN PAM
caggaagagaacugcaggua

SEQ ID NO: 3560 - RNA, 20 nt, Artificial Sequence
  targeting sequence with TTCN PAM
ugugaaucuguccagggggc

SEQ ID NO: 3561 - RNA, 20 nt, Artificial Sequence
  targeting sequence with TTCN PAM
cuuccugugaaucuguccag

SEQ ID NO: 3562 - RNA, 20 nt, Artificial Sequence
  targeting sequence with TTCN PAM
aaagggcauguuaccaaaug

SEQ ID NO: 3563 - RNA, 20 nt, Artificial Sequence
  targeting sequence with TTCN PAM
ccuacugcaucuugaacauu

SEQ ID NO: 3564 - RNA, 20 nt, Artificial Sequence
  targeting sequence with TTCN PAM
agaugcaguaggugaaacuu

SEQ ID NO: 3565 - RNA, 20 nt, Artificial Sequence
  targeting sequence with TTCN PAM
aaguggggcuugcccagcca

SEQ ID NO: 3566 - RNA, 20 nt, Artificial Sequence
  targeting sequence with TTCN PAM
gugaucacaaaucccuucca

SEQ ID NO: 3567 - RNA, 20 nt, Artificial Sequence
  targeting sequence with TTCN PAM
agucccuguaccuguaacuu

SEQ ID NO: 3568 - RNA, 20 nt, Artificial Sequence
  targeting sequence with TTCN PAM
aggcuguccauuguaccuuc

SEQ ID NO: 3569 - RNA, 20 nt, Artificial Sequence
  targeting sequence with TTCN PAM
gccuccuacaucugugugau

SEQ ID NO: 3570 - RNA, 20 nt, Artificial Sequence
  targeting sequence with TTCN PAM
cuguguccagaugugugacg

SEQ ID NO: 3571 - RNA, 20 nt, Artificial Sequence
  targeting sequence with TTCN PAM
gguggccgggacgcucugcu

SEQ ID NO: 3572 - RNA, 20 nt, Artificial Sequence
  targeting sequence with TTCN PAM
cuugguggagcgaaggggau

SEQ ID NO: 3573 - RNA, 20 nt, Artificial Sequence
  targeting sequence with TTCN PAM
cuccaccaagcgaagcagag

SEQ ID NO: 3574 - RNA, 20 nt, Artificial Sequence
  targeting sequence with TTCN PAM
ucugcugcggugcagguggc

SEQ ID NO: 3575 - RNA, 20 nt, Artificial Sequence
  targeting sequence with TTCN PAM
cugaggacuccacagugagg

SEQ ID NO: 3576 - RNA, 20 nt, Artificial Sequence
  targeting sequence with TTCN PAM
ccaugucuuuaaaagccaug

SEQ ID NO: 3577 - RNA, 20 nt, Artificial Sequence
  targeting sequence with TTCN PAM
uggguuucuccaugucuuua

SEQ ID NO: 3578 - RNA, 20 nt, Artificial Sequence
  targeting sequence with TTCN PAM
uggaggagguggcagcugag

SEQ ID NO: 3579 - RNA, 20 nt, Artificial Sequence
  targeting sequence with TTCN PAM
gucccauaccaagcugagcu

SEQ ID NO: 3580 - RNA, 20 nt, Artificial Sequence
  targeting sequence with TTCN PAM
ucauuugaaaugaaaaggac

SEQ ID NO: 3581 - RNA, 20 nt, Artificial Sequence
  targeting sequence with TTCN PAM
aaugaggaaguuaaagcuua

SEQ ID NO: 3582 - RNA, 20 nt, Artificial Sequence
  targeting sequence with TTCN PAM
uuucaaaugaggaaguuaaa

SEQ ID NO: 3583 - RNA, 20 nt, Artificial Sequence
  targeting sequence with TTCN PAM
ugcucccaggcaccucaguc

SEQ ID NO: 3584 - RNA, 20 nt, Artificial Sequence
  targeting sequence with TTCN PAM
gaccuagaguuacccacagc

SEQ ID NO: 3585 - RNA, 20 nt, Artificial Sequence
  targeting sequence with TTCN PAM
gagaacugacggugccacag

SEQ ID NO: 3586 - RNA, 20 nt, Artificial Sequence
  targeting sequence with TTCN PAM
cugaauagcacccagcauac

SEQ ID NO: 3587 - RNA, 20 nt, Artificial Sequence
  targeting sequence with TTCN PAM
ugagggcagggauuuugucu

SEQ ID NO: 3588 - RNA, 20 nt, Artificial Sequence
  targeting sequence with TTCN PAM
gucaccuuagugaccagcug

SEQ ID NO: 3589 - RNA, 20 nt, Artificial Sequence
  targeting sequence with TTCN PAM
caucugcccucuaagcaaac

SEQ ID NO: 3590 - RNA, 20 nt, Artificial Sequence
  targeting sequence with TTCN PAM
ugcugugggcagaacucacc

SEQ ID NO: 3591 - RNA, 20 nt, Artificial Sequence
  targeting sequence with TTCN PAM
gcccacagcaggaaguuugc

SEQ ID NO: 3592 - RNA, 20 nt, Artificial Sequence
  targeting sequence with TTCN PAM
ccucauccguaaaaugagga

SEQ ID NO: 3593 - RNA, 20 nt, Artificial Sequence
  targeting sequence with TTCN PAM
gagaagguguaaaugugguc

SEQ ID NO: 3594 - RNA, 20 nt, Artificial Sequence
  targeting sequence with TTCN PAM
cugaaccucuuucuccucau

SEQ ID NO: 3595 - RNA, 20 nt, Artificial Sequence
  targeting sequence with TTCN PAM
aggaggaauauucucugucc

SEQ ID NO: 3596 - RNA, 20 nt, Artificial Sequence
  targeting sequence with TTCN PAM
uccuggaaggaggcaaguug

SEQ ID NO: 3597 - RNA, 20 nt, Artificial Sequence
  targeting sequence with TTCN PAM
cuguccugcccucaucugca

SEQ ID NO: 3598 - RNA, 20 nt, Artificial Sequence
  targeting sequence with TTCN PAM
aauccaggaucccaucaauc

SEQ ID NO: 3599 - RNA, 20 nt, Artificial Sequence
  targeting sequence with TTCN PAM
guuccugcaggacccccaaa

SEQ ID NO: 3600 - RNA, 20 nt, Artificial Sequence
  targeting sequence with TTCN PAM
ugcaggacccccaaaguggu

SEQ ID NO: 3601 - RNA, 20 nt, Artificial Sequence
  targeting sequence with TTCN PAM
ucguaaguggggaugucaac

SEQ ID NO: 3602 - RNA, 20 nt, Artificial Sequence
  targeting sequence with TTCN PAM
caguggccgaggggccccca

SEQ ID NO: 3603 - RNA, 20 nt, Artificial Sequence
  targeting sequence with TTCN PAM
uccguaggguaugcaggugg

SEQ ID NO: 3604 - RNA, 20 nt, Artificial Sequence
  targeting sequence with TTCN PAM
gcggagacgacaccgagugc

SEQ ID NO: 3605 - RNA, 20 nt, Artificial Sequence
  targeting sequence with TTCN PAM
ucccaggcucaagagauccu

SEQ ID NO: 3606 - RNA, 20 nt, Artificial Sequence
  targeting sequence with TTCN PAM
ucucucugccuuagccuccu

SEQ ID NO: 3607 - RNA, 20 nt, Artificial Sequence
  targeting sequence with TTCN PAM
cauuuuacagaugaggaggc

SEQ ID NO: 3608 - RNA, 20 nt, Artificial Sequence
  targeting sequence with TTCN PAM
cucaaagagcugauuuguga

SEQ ID NO: 3609 - RNA, 20 nt, Artificial Sequence
  targeting sequence with TTCN PAM
auaaugaaagcccaggccag

SEQ ID NO: 3610 - RNA, 20 nt, Artificial Sequence
  targeting sequence with TTCN PAM
uuauugaaagugagcuggga

SEQ ID NO: 3611 - RNA, 20 nt, Artificial Sequence
  targeting sequence with TTCN PAM
caccuacaccuccaggcucc

SEQ ID NO: 3612 - RNA, 20 nt, Artificial Sequence
  targeting sequence with TTCN PAM
gugccugcccaguaaagugg

SEQ ID NO: 3613 - RNA, 20 nt, Artificial Sequence
  targeting sequence with TTCN PAM
aguuaggccacagaugagug

SEQ ID NO: 3614 - RNA, 20 nt, Artificial Sequence
  targeting sequence with TTCN PAM
ugaugcuggugaccuugagc

SEQ ID NO: 3615 - RNA, 20 nt, Artificial Sequence
  targeting sequence with TTCN PAM
ggacuuugcccaaaugucgc

SEQ ID NO: 3616 - RNA, 20 nt, Artificial Sequence
  targeting sequence with TTCN PAM
ucaggacuuugcccaaaugu

SEQ ID NO: 3617 - RNA, 20 nt, Artificial Sequence
  targeting sequence with TTCN PAM
uguagcugcauggcucccuc

SEQ ID NO: 3618 - RNA, 20 nt, Artificial Sequence
  targeting sequence with TTCN PAM
uccuguagcugcauggcucc

SEQ ID NO: 3619 - RNA, 20 nt, Artificial Sequence
  targeting sequence with TTCN PAM
gccuggagugcuguucuucc

SEQ ID NO: 3620 - RNA, 20 nt, Artificial Sequence
  targeting sequence with TTCN PAM
uucugccuggagugcuguuc

SEQ ID NO: 3621 - RNA, 20 nt, Artificial Sequence
  targeting sequence with TTCN PAM
aggaacagcauggggccagg

SEQ ID NO: 3622 - RNA, 20 nt, Artificial Sequence
  targeting sequence with TTCN PAM
uggaacacgcaugcauccca

SEQ ID NO: 3623 - RNA, 20 nt, Artificial Sequence
  targeting sequence with TTCN PAM
gguuagcaagccccgucacc

SEQ ID NO: 3624 - RNA, 20 nt, Artificial Sequence
  targeting sequence with TTCN PAM
uccccaggccugccccuccc

SEQ ID NO: 3625 - RNA, 20 nt, Artificial Sequence
  targeting sequence with TTCN PAM
ccugccccgucagaacucca

SEQ ID NO: 3626 - RNA, 20 nt, Artificial Sequence
  targeting sequence with TTCN PAM
cucccugccucgggguguca

SEQ ID NO: 3627 - RNA, 20 nt, Artificial Sequence
  targeting sequence with TTCN PAM
ggauccuugcgagcgggcuc

SEQ ID NO: 3628 - RNA, 20 nt, Artificial Sequence
  targeting sequence with TTCN PAM
ucguccagcagagggcgcgc

SEQ ID NO: 3629 - RNA, 20 nt, Artificial Sequence
  targeting sequence with TTCN PAM
ucgccugugaaaugcgggcg

SEQ ID NO: 3630 - RNA, 20 nt, Artificial Sequence
  targeting sequence with TTCN PAM
caggcgaggaaaccgagccu

SEQ ID NO: 3631 - RNA, 20 nt, Artificial Sequence
  targeting sequence with TTCN PAM
cccggggucagcggcugggc

SEQ ID NO: 3632 - RNA, 20 nt, Artificial Sequence
  targeting sequence with TTCN PAM
cacgcuaugcaccacccagu

SEQ ID NO: 3633 - RNA, 20 nt, Artificial Sequence
  targeting sequence with TTCN PAM
cauucacacgcuaugcacca

SEQ ID NO: 3634 - RNA, 20 nt, Artificial Sequence
  targeting sequence with TTCN PAM
uccauccccuucacauucac

SEQ ID NO: 3635 - RNA, 20 nt, Artificial Sequence
  targeting sequence with TTCN PAM
cauuuuacagaggaggaaac

SEQ ID NO: 3636 - RNA, 20 nt, Artificial Sequence
  targeting sequence with TTCN PAM
uccucuguaaaaugggaaua

SEQ ID NO: 3637 - RNA, 20 nt, Artificial Sequence
  targeting sequence with TTCN PAM
gcagcugagagcuguuagaa

SEQ ID NO: 3638 - RNA, 20 nt, Artificial Sequence
  targeting sequence with TTCN PAM
agagcuggaaggugugaggc

SEQ ID NO: 3639 - RNA, 20 nt, Artificial Sequence
  targeting sequence with TTCN PAM
agcucuagaaaacaggguac

SEQ ID NO: 3640 - RNA, 20 nt, Artificial Sequence
  targeting sequence with TTCN PAM
cacacacacuccaggccagc

SEQ ID NO: 3641 - RNA, 20 nt, Artificial Sequence
  targeting sequence with TTCN PAM
cucugggcccggcuggccug

SEQ ID NO: 3642 - RNA, 20 nt, Artificial Sequence
  targeting sequence with TTCN PAM
acggacccacacccagccac

SEQ ID NO: 3643 - RNA, 20 nt, Artificial Sequence
  targeting sequence with TTCN PAM
cgucagccauggcugccugg

SEQ ID NO: 3644 - RNA, 20 nt, Artificial Sequence
  targeting sequence with TTCN PAM
ggaucggcuucauugugcug

SEQ ID NO: 3645 - RNA, 20 nt, Artificial Sequence
  targeting sequence with TTCN PAM
uugugcuggggcuuuuccug

SEQ ID NO: 3646 - RNA, 20 nt, Artificial Sequence
  targeting sequence with TTCN PAM
ugcuggcccucgguacguuc

SEQ ID NO: 3647 - RNA, 20 nt, Artificial Sequence
  targeting sequence with TTCN PAM
ucaugagccaugaucggccc

SEQ ID NO: 3648 - RNA, 20 nt, Artificial Sequence
  targeting sequence with TTCN PAM
augccaugggcagcgucaug

SEQ ID NO: 3649 - RNA, 20 nt, Artificial Sequence
  targeting sequence with TTCN PAM
caucacuaaauuacacauaa

SEQ ID NO: 3650 - RNA, 20 nt, Artificial Sequence
  targeting sequence with TTCN PAM
aguucaaguccuguuccaaa

SEQ ID NO: 3651 - RNA, 20 nt, Artificial Sequence
  targeting sequence with TTCN PAM
aguccuguuccaaacucucu

SEQ ID NO: 3652 - RNA, 20 nt, Artificial Sequence
  targeting sequence with TTCN PAM
aaacucucuaugaccuuugu

SEQ ID NO: 3653 - RNA, 20 nt, Artificial Sequence
  targeting sequence with TTCN PAM
auuccacagagcuguuggga

SEQ ID NO: 3654 - RNA, 20 nt, Artificial Sequence
  targeting sequence with TTCN PAM
caacuccuggcauuuccauu

SEQ ID NO: 3655 - RNA, 20 nt, Artificial Sequence
  targeting sequence with TTCN PAM
augccuagagaggcugggug

SEQ ID NO: 3656 - RNA, 20 nt, Artificial Sequence
  targeting sequence with TTCN PAM
aaggucacacagcuggucag

SEQ ID NO: 3657 - RNA, 20 nt, Artificial Sequence
  targeting sequence with TTCN PAM
cccugggucuguaccugacc

SEQ ID NO: 3658 - RNA, 20 nt, Artificial Sequence
  targeting sequence with TTCN PAM
cuccuuuucucccugggucu

SEQ ID NO: 3659 - RNA, 20 nt, Artificial Sequence
  targeting sequence with TTCN PAM
guucagugcuggagcggucu

SEQ ID NO: 3660 - RNA, 20 nt, Artificial Sequence
  targeting sequence with TTCN PAM
gugcuggagcggucugggcu

SEQ ID NO: 3661 - RNA, 20 nt, Artificial Sequence
  targeting sequence with TTCN PAM
uugagcagaggucacuggga

SEQ ID NO: 3662 - RNA, 20 nt, Artificial Sequence
  targeting sequence with TTCN PAM
cccagugaccucugcucaag

SEQ ID NO: 3663 - RNA, 20 nt, Artificial Sequence
  targeting sequence with TTCN PAM
cuccuccccuccccuccccu

SEQ ID NO: 3664 - RNA, 20 nt, Artificial Sequence
  targeting sequence with TTCN PAM
uggguucacgugcuguggag

SEQ ID NO: 3665 - RNA, 20 nt, Artificial Sequence
  targeting sequence with TTCN PAM
cgugcuguggaggcagcgug

SEQ ID NO: 3666 - RNA, 20 nt, Artificial Sequence
  targeting sequence with TTCN PAM
aaucccugcuccuucauguc

SEQ ID NO: 3667 - RNA, 20 nt, Artificial Sequence
  targeting sequence with TTCN PAM
ugucccacuucugugaccuu

SEQ ID NO: 3668 - RNA, 20 nt, Artificial Sequence
  targeting sequence with TTCN PAM
gugaccuuggcagaaagagu

SEQ ID NO: 3669 - RNA, 20 nt, Artificial Sequence
  targeting sequence with TTCN PAM
gccaaggucacagaaguggg

SEQ ID NO: 3670 - RNA, 20 nt, Artificial Sequence
  targeting sequence with TTCN PAM
cugugaagccuguuuccucc

SEQ ID NO: 3671 - RNA, 20 nt, Artificial Sequence
  targeting sequence with TTCN PAM
ccaagcagagaagaugggga

SEQ ID NO: 3672 - RNA, 20 nt, Artificial Sequence
  targeting sequence with TTCN PAM
cugcuuggugaacucuuauc

SEQ ID NO: 3673 - RNA, 20 nt, Artificial Sequence
  targeting sequence with TTCN PAM
ccaucuucucugcuugguga

SEQ ID NO: 3674 - RNA, 20 nt, Artificial Sequence
  targeting sequence with TTCN PAM
aggcagaagaguagcaugau

SEQ ID NO: 3675 - RNA, 20 nt, Artificial Sequence
  targeting sequence with TTCN PAM
ucucuggucuuggugagagc

SEQ ID NO: 3676 - RNA, 20 nt, Artificial Sequence
  targeting sequence with TTCN PAM
cuggucuuggugagagcuga

SEQ ID NO: 3677 - RNA, 20 nt, Artificial Sequence
  targeting sequence with TTCN PAM
agaugacugucagcucucac

SEQ ID NO: 3678 - RNA, 20 nt, Artificial Sequence
  targeting sequence with TTCN PAM
gcauuauuccagaugacugu

SEQ ID NO: 3679 - RNA, 20 nt, Artificial Sequence
  targeting sequence with TTCN PAM
aacacaaagcuguaggaacu

SEQ ID NO: 3680 - RNA, 20 nt, Artificial Sequence
  targeting sequence with TTCN PAM
gacacaugcuacaacaucac

SEQ ID NO: 3681 - RNA, 20 nt, Artificial Sequence
  targeting sequence with TTCN PAM
auccuuaaggcugaauagua

SEQ ID NO: 3682 - RNA, 20 nt, Artificial Sequence
  targeting sequence with TTCN PAM
gccuuaaggauggaacuucu

SEQ ID NO: 3683 - RNA, 20 nt, Artificial Sequence
  targeting sequence with TTCN PAM
ucauauggauagacuauauu

SEQ ID NO: 3684 - RNA, 20 nt, Artificial Sequence
  targeting sequence with TTCN PAM
ucccugcugacucugacuuu

SEQ ID NO: 3685 - RNA, 20 nt, Artificial Sequence
  targeting sequence with TTCN PAM
aggcauccucuccccaaagg

SEQ ID NO: 3686 - RNA, 20 nt, Artificial Sequence
  targeting sequence with TTCN PAM
ccagcaggcccauggccuuu

SEQ ID NO: 3687 - RNA, 20 nt, Artificial Sequence
  targeting sequence with TTCN PAM
ucucggcagcaagcccauuc

SEQ ID NO: 3688 - RNA, 20 nt, Artificial Sequence
  targeting sequence with TTCN PAM
ugcccucccucucacucucc

SEQ ID NO: 3689 - RNA, 20 nt, Artificial Sequence
  targeting sequence with TTCN PAM
cacuuacugagaauguauua

SEQ ID NO: 3690 - RNA, 20 nt, Artificial Sequence
  targeting sequence with TTCN PAM
cauuguacagaugaggaaac

SEQ ID NO: 3691 - RNA, 20 nt, Artificial Sequence
  targeting sequence with TTCN PAM
ucaucuguacaaugggaaua

SEQ ID NO: 3692 - RNA, 20 nt, Artificial Sequence
  targeting sequence with TTCN PAM
gugaauacaagaucuccaug

SEQ ID NO: 3693 - RNA, 20 nt, Artificial Sequence
  targeting sequence with TTCN PAM
ccgaaacacugucucguccc

SEQ ID NO: 3694 - RNA, 20 nt, Artificial Sequence
  targeting sequence with TTCN PAM
uggagaucuuguauucaccg

SEQ ID NO: 3695 - RNA, 20 nt, Artificial Sequence
  targeting sequence with TTCN PAM
uuguaugauuuguuucaugg

SEQ ID NO: 3696 - RNA, 20 nt, Artificial Sequence
  targeting sequence with TTCN PAM
uagcuguauaaagagccuaa

SEQ ID NO: 3697 - RNA, 20 nt, Artificial Sequence
  targeting sequence with TTCN PAM
cugagccucaaucuuccuag

SEQ ID NO: 3698 - RNA, 20 nt, Artificial Sequence
  targeting sequence with TTCN PAM
cucucccacuccagccccag

SEQ ID NO: 3699 - RNA, 20 nt, Artificial Sequence
  targeting sequence with TTCN PAM
ucccacagccuuacauaggg

SEQ ID NO: 3700 - RNA, 20 nt, Artificial Sequence
  targeting sequence with TTCN PAM
gccacauccagaugaaaguc

SEQ ID NO: 3701 - RNA, 20 nt, Artificial Sequence
  targeting sequence with TTCN PAM
ucuggauguggcugaaguca

SEQ ID NO: 3702 - RNA, 20 nt, Artificial Sequence
  targeting sequence with TTCN PAM
gcugccccaucucaggggcc

SEQ ID NO: 3703 - RNA, 20 nt, Artificial Sequence
  targeting sequence with TTCN PAM
cagcuucggcugccccaucu

SEQ ID NO: 3704 - RNA, 20 nt, Artificial Sequence
  targeting sequence with TTCN PAM
ccuccaucacugguucccag

SEQ ID NO: 3705 - RNA, 20 nt, Artificial Sequence
  targeting sequence with TTCN PAM
ggccuggauggaggcugccg

SEQ ID NO: 3706 - RNA, 20 nt, Artificial Sequence
  targeting sequence with TTCN PAM
cucucgucugagcccuugug

SEQ ID NO: 3707 - RNA, 20 nt, Artificial Sequence
  targeting sequence with TTCN PAM
ccuucacucucgucugagcc

SEQ ID NO: 3708 - RNA, 20 nt, Artificial Sequence
  targeting sequence with TTCN PAM
gcccaguucaaggguuaaaa

SEQ ID NO: 3709 - RNA, 20 nt, Artificial Sequence
  targeting sequence with TTCN PAM
aaccccagcuccugugcugu

SEQ ID NO: 3710 - RNA, 20 nt, Artificial Sequence
  targeting sequence with TTCN PAM
uuacuuucccuagccucagu

SEQ ID NO: 3711 - RNA, 20 nt, Artificial Sequence
  targeting sequence with TTCN PAM
cuagccucaguuuccccaca

SEQ ID NO: 3712 - RNA, 20 nt, Artificial Sequence
  targeting sequence with TTCN PAM
ccacacagggaugaucauuc

SEQ ID NO: 3713 - RNA, 20 nt, Artificial Sequence
  targeting sequence with TTCN PAM
uacuacccaggaauguugag

SEQ ID NO: 3714 - RNA, 20 nt, Artificial Sequence
  targeting sequence with TTCN PAM
uggguaguaggaaugaucau

SEQ ID NO: 3715 - RNA, 20 nt, Artificial Sequence
  targeting sequence with TTCN PAM
gagacaucaagggccuacug

SEQ ID NO: 3716 - RNA, 20 nt, Artificial Sequence
  targeting sequence with TTCN PAM
aauuugggucugcugcugac

SEQ ID NO: 3717 - RNA, 20 nt, Artificial Sequence
  targeting sequence with TTCN PAM
caaacagacagggaugggag

SEQ ID NO: 3718 - RNA, 20 nt, Artificial Sequence
  targeting sequence with TTCN PAM
uccauguacuuauucauucc

SEQ ID NO: 3719 - RNA, 20 nt, Artificial Sequence
  targeting sequence with TTCN PAM
uuccauccacauuacugagc

SEQ ID NO: 3720 - RNA, 20 nt, Artificial Sequence
  targeting sequence with TTCN PAM
auccacauuacugagcacca

SEQ ID NO: 3721 - RNA, 20 nt, Artificial Sequence
  targeting sequence with TTCN PAM
ugcccagccuucacuggaau

SEQ ID NO: 3722 - RNA, 20 nt, Artificial Sequence
  targeting sequence with TTCN PAM
cuggaaucuaccccugagga

SEQ ID NO: 3723 - RNA, 20 nt, Artificial Sequence
  targeting sequence with TTCN PAM
agugaaggcugggcaggaag

SEQ ID NO: 3724 - RNA, 20 nt, Artificial Sequence
  targeting sequence with TTCN PAM
ccucuguugcucauaggccc

SEQ ID NO: 3725 - RNA, 20 nt, Artificial Sequence
  targeting sequence with TTCN PAM
ggguucuccucuguugcuca

SEQ ID NO: 3726 - RNA, 20 nt, Artificial Sequence
  targeting sequence with TTCN PAM
ccaauuauucaggguucucc

SEQ ID NO: 3727 - RNA, 20 nt, Artificial Sequence
  targeting sequence with TTCN PAM
gauaauagcauaguaauagc

SEQ ID NO: 3728 - RNA, 20 nt, Artificial Sequence
  targeting sequence with TTCN PAM
ugagcaccuucuaugugcca

SEQ ID NO: 3729 - RNA, 20 nt, Artificial Sequence
  targeting sequence with TTCN PAM
augugccaggcacugugcaa

SEQ ID NO: 3730 - RNA, 20 nt, Artificial Sequence
  targeting sequence with TTCN PAM
uagguuuacagcagauaaua

SEQ ID NO: 3731 - RNA, 20 nt, Artificial Sequence
  targeting sequence with TTCN PAM
uucuuagguuuacagcagau

SEQ ID NO: 3732 - RNA, 20 nt, Artificial Sequence
  targeting sequence with TTCN PAM
cuccugcaguucuuucuuag

SEQ ID NO: 3733 - RNA, 20 nt, Artificial Sequence
  targeting sequence with TTCN PAM
guuauugggaagaaacugag

SEQ ID NO: 3734 - RNA, 20 nt, Artificial Sequence
  targeting sequence with TTCN PAM
caauaacagaauucacuccu

SEQ ID NO: 3735 - RNA, 20 nt, Artificial Sequence
  targeting sequence with TTCN PAM
ucccaauaacagaauucacu

SEQ ID NO: 3736 - RNA, 20 nt, Artificial Sequence
  targeting sequence with TTCN PAM
cgggccucaguuucuuccca

SEQ ID NO: 3737 - RNA, 20 nt, Artificial Sequence
  targeting sequence with TTCN PAM
agccgcuagcugcaagaccu

SEQ ID NO: 3738 - RNA, 20 nt, Artificial Sequence
  targeting sequence with TTCN PAM
gacucagagauacccuugcc

SEQ ID NO: 3739 - RNA, 20 nt, Artificial Sequence
  targeting sequence with TTCN PAM
uuccaagaugaccuggacau

SEQ ID NO: 3740 - RNA, 20 nt, Artificial Sequence
  targeting sequence with TTCN PAM
aagaugaccuggacauggac

SEQ ID NO: 3741 - RNA, 20 nt, Artificial Sequence
  targeting sequence with TTCN PAM
cuggaguccauguccagguc

SEQ ID NO: 3742 - RNA, 20 nt, Artificial Sequence
  targeting sequence with TTCN PAM
ucccugucauguggagaugc

SEQ ID NO: 3743 - RNA, 20 nt, Artificial Sequence
  targeting sequence with TTCN PAM
uguuguggggaacaagcuuc

SEQ ID NO: 3744 - RNA, 20 nt, Artificial Sequence
  targeting sequence with TTCN PAM
aagacuuugcccugauugau

SEQ ID NO: 3745 - RNA, 20 nt, Artificial Sequence
  targeting sequence with TTCN PAM
cacugcugccccucuugggg

SEQ ID NO: 3746 - RNA, 20 nt, Artificial Sequence
  targeting sequence with TTCN PAM
ccuccaccuuuguccuuggg

SEQ ID NO: 3747 - RNA, 20 nt, Artificial Sequence
  targeting sequence with TTCN PAM
gacacagguggggaggaacc

SEQ ID NO: 3748 - RNA, 20 nt, Artificial Sequence
  targeting sequence with TTCN PAM
uccccaccuguguccgaagc

SEQ ID NO: 3749 - RNA, 20 nt, Artificial Sequence
  targeting sequence with TTCN PAM
cagguuccuccccaccugug

SEQ ID NO: 3750 - RNA, 20 nt, Artificial Sequence
  targeting sequence with TTCN PAM
uucucagguuccuccccacc

SEQ ID NO: 3751 - RNA, 20 nt, Artificial Sequence
  targeting sequence with TTCN PAM
ucuuccuucucagguuccuc

SEQ ID NO: 3752 - RNA, 20 nt, Artificial Sequence
  targeting sequence with TTCN PAM
agucuggaacugcugcugac

SEQ ID NO: 3753 - RNA, 20 nt, Artificial Sequence
  targeting sequence with TTCN PAM
agacuagaagcuacggagca

SEQ ID NO: 3754 - RNA, 20 nt, Artificial Sequence
  targeting sequence with TTCN PAM
aauaguuaguggucuuuggc

SEQ ID NO: 3755 - RNA, 20 nt, Artificial Sequence
  targeting sequence with TTCN PAM
aagguuggccaaagaccacu

SEQ ID NO: 3756 - RNA, 20 nt, Artificial Sequence
  targeting sequence with TTCN PAM
gcugcugcaaaccucaacaa

SEQ ID NO: 3757 - RNA, 20 nt, Artificial Sequence
  targeting sequence with TTCN PAM
cccaaagcugaccucugaga

SEQ ID NO: 3758 - RNA, 20 nt, Artificial Sequence
  targeting sequence with TTCN PAM
ucucagaggucagcuuuggg

SEQ ID NO: 3759 - RNA, 20 nt, Artificial Sequence
  targeting sequence with TTCN PAM
uuggugcucccucugggccc

SEQ ID NO: 3760 - RNA, 20 nt, Artificial Sequence
  targeting sequence with TTCN PAM
caaaggaucaggggcccaga

SEQ ID NO: 3761 - RNA, 20 nt, Artificial Sequence
  targeting sequence with TTCN PAM
cugcagcugccaggauccug

SEQ ID NO: 3762 - RNA, 20 nt, Artificial Sequence
  targeting sequence with TTCN PAM
ccugggcuaugggguucugg

SEQ ID NO: 3763 - RNA, 20 nt, Artificial Sequence
  targeting sequence with TTCN PAM
ggguugaggcugggguuccc

SEQ ID NO: 3764 - RNA, 20 nt, Artificial Sequence
  targeting sequence with TTCN PAM
cggccuagggaagggcuucc

SEQ ID NO: 3765 - RNA, 20 nt, Artificial Sequence
  targeting sequence with TTCN PAM
cuaggccgggaaccccagcc

SEQ ID NO: 3766 - RNA, 20 nt, Artificial Sequence
  targeting sequence with TTCN PAM
ggguugaggccggggguccu

SEQ ID NO: 3767 - RNA, 20 nt, Artificial Sequence
  targeting sequence with TTCN PAM
cuaggccaggacccccggcc

SEQ ID NO: 3768 - RNA, 20 nt, Artificial Sequence
  targeting sequence with TTCN PAM
cagggccaugaccuuguaac

SEQ ID NO: 3769 - RNA, 20 nt, Artificial Sequence
  targeting sequence with TTCN PAM
uuuucuuucugggucauuuc

SEQ ID NO: 3770 - RNA, 20 nt, Artificial Sequence
  targeting sequence with TTCN PAM
uucugggucauuucugccuc

SEQ ID NO: 3771 - RNA, 20 nt, Artificial Sequence
  targeting sequence with TTCN PAM
gggucauuucugccucugca

SEQ ID NO: 3772 - RNA, 20 nt, Artificial Sequence
  targeting sequence with TTCN PAM
gccucugcagugaaggaugc

SEQ ID NO: 3773 - RNA, 20 nt, Artificial Sequence
  targeting sequence with TTCN PAM
cugcagaggcagaaaugacc

SEQ ID NO: 3774 - RNA, 20 nt, Artificial Sequence
  targeting sequence with TTCN PAM
uggucacagcugagucuucg

SEQ ID NO: 3775 - RNA, 20 nt, Artificial Sequence
  targeting sequence with TTCN PAM
gaugaggugagggguagcau

SEQ ID NO: 3776 - RNA, 20 nt, Artificial Sequence
  targeting sequence with TTCN PAM
aacguggguuguaggcugcc

SEQ ID NO: 3777 - RNA, 20 nt, Artificial Sequence
  targeting sequence with TTCN PAM
acauuuaaaggggucaucuu

SEQ ID NO: 3778 - RNA, 20 nt, Artificial Sequence
  targeting sequence with TTCN PAM
uucaccugcaaauucuuuuc

SEQ ID NO: 3779 - RNA, 20 nt, Artificial Sequence
  targeting sequence with TTCN PAM
ccugcaaauucuuuucuuua

SEQ ID NO: 3780 - RNA, 20 nt, Artificial Sequence
  targeting sequence with TTCN PAM
uuucuuuaaaaccaccccuu

SEQ ID NO: 3781 - RNA, 20 nt, Artificial Sequence
  targeting sequence with TTCN PAM
uuaaaaccaccccuucccuc

SEQ ID NO: 3782 - RNA, 20 nt, Artificial Sequence
  targeting sequence with TTCN PAM
cucggggcaggauacgugag

SEQ ID NO: 3783 - RNA, 20 nt, Artificial Sequence
  targeting sequence with TTCN PAM
ggaaguaagcccucacugca

SEQ ID NO: 3784 - RNA, 20 nt, Artificial Sequence
  targeting sequence with TTCN PAM
ggaagagggccucuggugcc

SEQ ID NO: 3785 - RNA, 20 nt, Artificial Sequence
  targeting sequence with TTCN PAM
gcaccacacagcacacccca

SEQ ID NO: 3786 - RNA, 20 nt, Artificial Sequence
  targeting sequence with TTCN PAM
ccacaccccugaaccacaac

SEQ ID NO: 3787 - RNA, 20 nt, Artificial Sequence
  targeting sequence with TTCN PAM
gggguguggggaaucacucc

SEQ ID NO: 3788 - RNA, 20 nt, Artificial Sequence
  targeting sequence with TTCN PAM
ugcuggcaggcccagcaacc

SEQ ID NO: 3789 - RNA, 20 nt, Artificial Sequence
  targeting sequence with TTCN PAM
agaguuagcaucugcagggg

SEQ ID NO: 3790 - RNA, 20 nt, Artificial Sequence
  targeting sequence with TTCN PAM
ugggcagaucaggugugugg

SEQ ID NO: 3791 - RNA, 20 nt, Artificial Sequence
  targeting sequence with TTCN PAM
cgcucgaagauaccucauuu

SEQ ID NO: 3792 - RNA, 20 nt, Artificial Sequence
  targeting sequence with TTCN PAM
agcgugaaaggggccuccua

SEQ ID NO: 3793 - RNA, 20 nt, Artificial Sequence
  targeting sequence with TTCN PAM
caugugcaaaugacagauga

SEQ ID NO: 3794 - RNA, 20 nt, Artificial Sequence
  targeting sequence with TTCN PAM
ucugucauuugcacaugaga

SEQ ID NO: 3795 - RNA, 20 nt, Artificial Sequence
  targeting sequence with TTCN PAM
aagauaugcgcacuucaucu

SEQ ID NO: 3796 - RNA, 20 nt, Artificial Sequence
  targeting sequence with TTCN PAM
aagauuccaagauaugcgca

SEQ ID NO: 3797 - RNA, 20 nt, Artificial Sequence
  targeting sequence with TTCN PAM
ucuugcaguaagggggaaug

SEQ ID NO: 3798 - RNA, 20 nt, Artificial Sequence
  targeting sequence with TTCN PAM
ugcaguaagggggaaugaac

SEQ ID NO: 3799 - RNA, 20 nt, Artificial Sequence
  targeting sequence with TTCN PAM
cccuuacugcaagaagaaac

SEQ ID NO: 3800 - RNA, 20 nt, Artificial Sequence
  targeting sequence with TTCN PAM
uucccccuuacugcaagaag

SEQ ID NO: 3801 - RNA, 20 nt, Artificial Sequence
  targeting sequence with TTCN PAM
cugugguguucauucccccu

SEQ ID NO: 3802 - RNA, 20 nt, Artificial Sequence
  targeting sequence with TTCN PAM
gagacucccccugguucgcu

SEQ ID NO: 3803 - RNA, 20 nt, Artificial Sequence
  targeting sequence with TTCN PAM
aauaccucuuucagagacuc

SEQ ID NO: 3804 - RNA, 20 nt, Artificial Sequence
  targeting sequence with TTCN PAM
agagucccuccaaccugaca

SEQ ID NO: 3805 - RNA, 20 nt, Artificial Sequence
  targeting sequence with TTCN PAM
acccucuggagagggaaagg

SEQ ID NO: 3806 - RNA, 20 nt, Artificial Sequence
  targeting sequence with TTCN PAM
cucuccagaggguggaaacu

SEQ ID NO: 3807 - RNA, 20 nt, Artificial Sequence
  targeting sequence with TTCN PAM
cugccccugggcccccugcc

SEQ ID NO: 3808 - RNA, 20 nt, Artificial Sequence
  targeting sequence with TTCN PAM
cuguaaaauugggugagggu

SEQ ID NO: 3809 - RNA, 20 nt, Artificial Sequence
  targeting sequence with TTCN PAM
ggagccugggauuuauaaca

SEQ ID NO: 3810 - RNA, 20 nt, Artificial Sequence
  targeting sequence with TTCN PAM
gauucuggagccugggauuu

SEQ ID NO: 3811 - RNA, 20 nt, Artificial Sequence
  targeting sequence with TTCN PAM
gccucagccaguuccuugcu

SEQ ID NO: 3812 - RNA, 20 nt, Artificial Sequence
  targeting sequence with TTCN PAM
acugagcaucucccugugcu

SEQ ID NO: 3813 - RNA, 20 nt, Artificial Sequence
  targeting sequence with TTCN PAM
augacugccuauugcccaca

SEQ ID NO: 3814 - RNA, 20 nt, Artificial Sequence
  targeting sequence with TTCN PAM
cccaguaccuagcacagggg

SEQ ID NO: 3815 - RNA, 20 nt, Artificial Sequence
  targeting sequence with TTCN PAM
cccaagacaagcauggguca

SEQ ID NO: 3816 - RNA, 20 nt, Artificial Sequence
  targeting sequence with TTCN PAM
uuugugggaucacagauauu

SEQ ID NO: 3817 - RNA, 20 nt, Artificial Sequence
  targeting sequence with TTCN PAM
uuuguuucuuuugugggauc

SEQ ID NO: 3818 - RNA, 20 nt, Artificial Sequence
  targeting sequence with TTCN PAM
ccugagguuaaccauguuuu

SEQ ID NO: 3819 - RNA, 20 nt, Artificial Sequence
  targeting sequence with TTCN PAM
uguuuuaauuugcauucccc

SEQ ID NO: 3820 - RNA, 20 nt, Artificial Sequence
  targeting sequence with TTCN PAM
cccauaacacuggcaucauu

SEQ ID NO: 3821 - RNA, 20 nt, Artificial Sequence
  targeting sequence with TTCN PAM
gccagcuccaccuauuauua

SEQ ID NO: 3822 - RNA, 20 nt, Artificial Sequence
  targeting sequence with TTCN PAM
uccacauucugccagcucca

SEQ ID NO: 3823 - RNA, 20 nt, Artificial Sequence
  targeting sequence with TTCN PAM
gacguugcugaugugaaugg

SEQ ID NO: 3824 - RNA, 20 nt, Artificial Sequence
  targeting sequence with TTCN PAM
cuuaauuauacauuacaaaa

SEQ ID NO: 3825 - RNA, 20 nt, Artificial Sequence
  targeting sequence with TTCN PAM
cuccuuccuugauuuuguuu

SEQ ID NO: 3826 - RNA, 20 nt, Artificial Sequence
  targeting sequence with TTCN PAM
uugauuuuguuugugaguga

SEQ ID NO: 3827 - RNA, 20 nt, Artificial Sequence
  targeting sequence with TTCN PAM
gucaaugaauugugauuggu

SEQ ID NO: 3828 - RNA, 20 nt, Artificial Sequence
  targeting sequence with TTCN PAM
uugacugaaaguggggaugu

SEQ ID NO: 3829 - RNA, 20 nt, Artificial Sequence
  targeting sequence with TTCN PAM
cugcugcuggaggugguccu

SEQ ID NO: 3830 - RNA, 20 nt, Artificial Sequence
  targeting sequence with TTCN PAM
ggccaguaagaccuaaagag

SEQ ID NO: 3831 - RNA, 20 nt, Artificial Sequence
  targeting sequence with TTCN PAM
cuuuaggucuuacuggccag

SEQ ID NO: 3832 - RNA, 20 nt, Artificial Sequence
  targeting sequence with TTCN PAM
gaaguuuuugcuuuuauaau

SEQ ID NO: 3833 - RNA, 20 nt, Artificial Sequence
  targeting sequence with TTCN PAM
gaaagugacccccaacagau

SEQ ID NO: 3834 - RNA, 20 nt, Artificial Sequence
  targeting sequence with TTCN PAM
gcauuuuuauuauaaaagca

SEQ ID NO: 3835 - RNA, 20 nt, Artificial Sequence
  targeting sequence with TTCN PAM
augccugcaaaggcagucac

SEQ ID NO: 3836 - RNA, 20 nt, Artificial Sequence
  targeting sequence with TTCN PAM
cucaugacugcaagacagcu

SEQ ID NO: 3837 - RNA, 20 nt, Artificial Sequence
  targeting sequence with TTCN PAM
aagagauucacagagaugcu

SEQ ID NO: 3838 - RNA, 20 nt, Artificial Sequence
  targeting sequence with TTCN PAM
cagagaugcuggaccuaaca

SEQ ID NO: 3839 - RNA, 20 nt, Artificial Sequence
  targeting sequence with TTCN PAM
acaauguuagguccagcauc

SEQ ID NO: 3840 - RNA, 20 nt, Artificial Sequence
  targeting sequence with TTCN PAM
cugguucaacaauguuaggu

SEQ ID NO: 3841 - RNA, 20 nt, Artificial Sequence
  targeting sequence with TTCN PAM
gaaagcugagugggaccauc

SEQ ID NO: 3842 - RNA, 20 nt, Artificial Sequence
  targeting sequence with TTCN PAM
gaaaauauguauuuauagcc

SEQ ID NO: 3843 - RNA, 20 nt, Artificial Sequence
  targeting sequence with TTCN PAM
cacaacaaauccaggucauc

SEQ ID NO: 3844 - RNA, 20 nt, Artificial Sequence
  targeting sequence with TTCN PAM
ugcagaugaccuggauuugu

SEQ ID NO: 3845 - RNA, 20 nt, Artificial Sequence
  targeting sequence with TTCN PAM
ucaaggucauuuucaugcag

SEQ ID NO: 3846 - RNA, 20 nt, Artificial Sequence
  targeting sequence with TTCN PAM
ucuccuccaauuuuccucaa

SEQ ID NO: 3847 - RNA, 20 nt, Artificial Sequence
  targeting sequence with TTCN PAM
ucccuggcugagauggcuga

SEQ ID NO: 3848 - RNA, 20 nt, Artificial Sequence
  targeting sequence with TTCN PAM
cugcaccauuaacacccuga

SEQ ID NO: 3849 - RNA, 20 nt, Artificial Sequence
  targeting sequence with TTCN PAM
aucaccuccucgucagggug

SEQ ID NO: 3850 - RNA, 20 nt, Artificial Sequence
  targeting sequence with TTCN PAM
ggggccccuagcccucaccc

SEQ ID NO: 3851 - RNA, 20 nt, Artificial Sequence
  targeting sequence with TTCN PAM
gcugcuucgggggccccuag

SEQ ID NO: 3852 - RNA, 20 nt, Artificial Sequence
  targeting sequence with TTCN PAM
ucccgguccccaccuccacu

SEQ ID NO: 3853 - RNA, 20 nt, Artificial Sequence
  targeting sequence with TTCN PAM
uuccuuucacccuggaccuc

SEQ ID NO: 3854 - RNA, 20 nt, Artificial Sequence
  targeting sequence with TTCN PAM
uuucacccuggaccucagag

SEQ ID NO: 3855 - RNA, 20 nt, Artificial Sequence
  targeting sequence with TTCN PAM
cccuggaccucagagcacug

SEQ ID NO: 3856 - RNA, 20 nt, Artificial Sequence
  targeting sequence with TTCN PAM
ucccccuccaugcuugccuc

SEQ ID NO: 3857 - RNA, 20 nt, Artificial Sequence
  targeting sequence with TTCN PAM
aaagcaguuuuagaugugcu

SEQ ID NO: 3858 - RNA, 20 nt, Artificial Sequence
  targeting sequence with TTCN PAM
gcugaugagugaacugaggc

SEQ ID NO: 3859 - RNA, 20 nt, Artificial Sequence
  targeting sequence with TTCN PAM
cucaucagcagaacaguggc

SEQ ID NO: 3860 - RNA, 20 nt, Artificial Sequence
  targeting sequence with TTCN PAM
gagccucaguucacucauca

SEQ ID NO: 3861 - RNA, 20 nt, Artificial Sequence
  targeting sequence with TTCN PAM
cggugugacccugggcaaca

SEQ ID NO: 3862 - RNA, 20 nt, Artificial Sequence
  targeting sequence with TTCN PAM
aaucccagcucugcuacaaa

SEQ ID NO: 3863 - RNA, 20 nt, Artificial Sequence
  targeting sequence with TTCN PAM
ggaucuccgccugggucgug

SEQ ID NO: 3864 - RNA, 20 nt, Artificial Sequence
  targeting sequence with TTCN PAM
gccuccacaacauccccuuc

SEQ ID NO: 3865 - RNA, 20 nt, Artificial Sequence
  targeting sequence with TTCN PAM
cccuuucuucccuccucaug

SEQ ID NO: 3866 - RNA, 20 nt, Artificial Sequence
  targeting sequence with TTCN PAM
ucccuccucaugauagccac

SEQ ID NO: 3867 - RNA, 20 nt, Artificial Sequence
  targeting sequence with TTCN PAM
cuccucaugauagccacugu

SEQ ID NO: 3868 - RNA, 20 nt, Artificial Sequence
  targeting sequence with TTCN PAM
cuuuggucuggagagagugg

SEQ ID NO: 3869 - RNA, 20 nt, Artificial Sequence
  targeting sequence with TTCN PAM
gcuggaccaggagcuccuac

SEQ ID NO: 3870 - RNA, 20 nt, Artificial Sequence
  targeting sequence with TTCN PAM
cuuugccaagggaguccucu

SEQ ID NO: 3871 - RNA, 20 nt, Artificial Sequence
  targeting sequence with TTCN PAM
cccucuucucuuugccaagg

SEQ ID NO: 3872 - RNA, 20 nt, Artificial Sequence
  targeting sequence with TTCN PAM
gcccuauguucccccucuuc

SEQ ID NO: 3873 - RNA, 20 nt, Artificial Sequence
  targeting sequence with TTCN PAM
gggagugcugccuggaggag

SEQ ID NO: 3874 - RNA, 20 nt, Artificial Sequence
  targeting sequence with TTCN PAM
caugacacccaccccaaggg

SEQ ID NO: 3875 - RNA, 20 nt, Artificial Sequence
  targeting sequence with TTCN PAM
uugccugauaauucucauga

SEQ ID NO: 3876 - RNA, 20 nt, Artificial Sequence
  targeting sequence with TTCN PAM
cagcauucuuugccugauaa

SEQ ID NO: 3877 - RNA, 20 nt, Artificial Sequence
  targeting sequence with TTCN PAM
aggaggaaggcauagcauga

SEQ ID NO: 3878 - RNA, 20 nt, Artificial Sequence
  targeting sequence with TTCN PAM
uccuggaaugcccuucccag

SEQ ID NO: 3879 - RNA, 20 nt, Artificial Sequence
  targeting sequence with TTCN PAM
gggaguaaaucugugguucc

SEQ ID NO: 3880 - RNA, 20 nt, Artificial Sequence
  targeting sequence with TTCN PAM
cacacuuagggcugcuuugg

SEQ ID NO: 3881 - RNA, 20 nt, Artificial Sequence
  targeting sequence with TTCN PAM
uaaacuccucaggagauacc

SEQ ID NO: 3882 - RNA, 20 nt, Artificial Sequence
  targeting sequence with TTCN PAM
ugggcccaguuccuggagau

SEQ ID NO: 3883 - RNA, 20 nt, Artificial Sequence
  targeting sequence with TTCN PAM
uggagauucugggccaggca

SEQ ID NO: 3884 - RNA, 20 nt, Artificial Sequence
  targeting sequence with TTCN PAM
gggccaggcagaggaaucug

SEQ ID NO: 3885 - RNA, 20 nt, Artificial Sequence
  targeting sequence with TTCN PAM
ucugccuggcccagaaucuc

SEQ ID NO: 3886 - RNA, 20 nt, Artificial Sequence
  targeting sequence with TTCN PAM
caaagcgggaggguaggagg

SEQ ID NO: 3887 - RNA, 20 nt, Artificial Sequence
  targeting sequence with TTCN PAM
accacucugaugcagguggc

SEQ ID NO: 3888 - RNA, 20 nt, Artificial Sequence
  targeting sequence with TTCN PAM
ccaagcauggcccaggggcc

SEQ ID NO: 3889 - RNA, 20 nt, Artificial Sequence
  targeting sequence with TTCN PAM
uacagcgcacuccaccucug

SEQ ID NO: 3890 - RNA, 20 nt, Artificial Sequence
  targeting sequence with TTCN PAM
gcagcucuuccuacagcgca

SEQ ID NO: 3891 - RNA, 20 nt, Artificial Sequence
  targeting sequence with TTCN PAM
auaggcuuguccaagagggu

SEQ ID NO: 3892 - RNA, 20 nt, Artificial Sequence
  targeting sequence with TTCN PAM
cuuuucaucauucucuagug

SEQ ID NO: 3893 - RNA, 20 nt, Artificial Sequence
  targeting sequence with TTCN PAM
ucauucucuagugcucuuau

SEQ ID NO: 3894 - RNA, 20 nt, Artificial Sequence
  targeting sequence with TTCN PAM
cuagugcucuuaucaccaac

SEQ ID NO: 3895 - RNA, 20 nt, Artificial Sequence
  targeting sequence with TTCN PAM
gccuauaaguuggugauaag

SEQ ID NO: 3896 - RNA, 20 nt, Artificial Sequence
  targeting sequence with TTCN PAM
cucaacuaugagggcugcau

SEQ ID NO: 3897 - RNA, 20 nt, Artificial Sequence
  targeting sequence with TTCN PAM
caugcagcccucauaguuga

SEQ ID NO: 3898 - RNA, 20 nt, Artificial Sequence
  targeting sequence with TTCN PAM
cugcuguaccccaaugucug

SEQ ID NO: 3899 - RNA, 20 nt, Artificial Sequence
  targeting sequence with TTCN PAM
auguuacagacauuggggua

SEQ ID NO: 3900 - RNA, 20 nt, Artificial Sequence
  targeting sequence with TTCN PAM
guuugcauuuuuuuucuuuu

SEQ ID NO: 3901 - RNA, 20 nt, Artificial Sequence
  targeting sequence with TTCN PAM
uuuugagauggagucucccu

SEQ ID NO: 3902 - RNA, 20 nt, Artificial Sequence
  targeting sequence with TTCN PAM
uccugggugacaagagggag

SEQ ID NO: 3903 - RNA, 20 nt, Artificial Sequence
  targeting sequence with TTCN PAM
agcgauucucugccucagcc

SEQ ID NO: 3904 - RNA, 20 nt, Artificial Sequence
  targeting sequence with TTCN PAM
cugccucagccuaccgagua

SEQ ID NO: 3905 - RNA, 20 nt, Artificial Sequence
  targeting sequence with TTCN PAM
ccauguuggucaggcugguc

SEQ ID NO: 3906 - RNA, 20 nt, Artificial Sequence
  targeting sequence with TTCN PAM
agaccagccugaccaacaug

SEQ ID NO: 3907 - RNA, 20 nt, Artificial Sequence
  targeting sequence with TTCN PAM
ggugauccacccgccucagc

SEQ ID NO: 3908 - RNA, 20 nt, Artificial Sequence
  targeting sequence with TTCN PAM
acccuaaaaaaacaaaaugc

SEQ ID NO: 3909 - RNA, 20 nt, Artificial Sequence
  targeting sequence with TTCN PAM
ugccagccucucagcacgcu

SEQ ID NO: 3910 - RNA, 20 nt, Artificial Sequence
  targeting sequence with TTCN PAM
cugacaugucugccuggcuc

SEQ ID NO: 3911 - RNA, 20 nt, Artificial Sequence
  targeting sequence with TTCN PAM
cuuuaagccggcagggagug

SEQ ID NO: 3912 - RNA, 20 nt, Artificial Sequence
  targeting sequence with TTCN PAM
uggcaccugccacaggcagc

SEQ ID NO: 3913 - RNA, 20 nt, Artificial Sequence
  targeting sequence with TTCN PAM
ccaugaaguggcagacaagg

SEQ ID NO: 3914 - RNA, 20 nt, Artificial Sequence
  targeting sequence with TTCN PAM
uggagaaaaggaggccacug

SEQ ID NO: 3915 - RNA, 20 nt, Artificial Sequence
  targeting sequence with TTCN PAM
ugggaagagaggggaggaga

SEQ ID NO: 3916 - RNA, 20 nt, Artificial Sequence
  targeting sequence with TTCN PAM
caggaagccccuugucugcc

SEQ ID NO: 3917 - RNA, 20 nt, Artificial Sequence
  targeting sequence with TTCN PAM
ugagcagguggagaggaaag

SEQ ID NO: 3918 - RNA, 20 nt, Artificial Sequence
  targeting sequence with TTCN PAM
ucuccaccugcucaagaaug

SEQ ID NO: 3919 - RNA, 20 nt, Artificial Sequence
  targeting sequence with TTCN PAM
gaaucucccagaguccccua

SEQ ID NO: 3920 - RNA, 20 nt, Artificial Sequence
  targeting sequence with TTCN PAM
gaacaaaagagggucaugac

SEQ ID NO: 3921 - RNA, 20 nt, Artificial Sequence
  targeting sequence with TTCN PAM
uaccaccauuauaacuggac

SEQ ID NO: 3922 - RNA, 20 nt, Artificial Sequence
  targeting sequence with TTCN PAM
uggagguggcagcucgggau

SEQ ID NO: 3923 - RNA, 20 nt, Artificial Sequence
  targeting sequence with TTCN PAM
gugcccaucugacugaguuc

SEQ ID NO: 3924 - RNA, 20 nt, Artificial Sequence
  targeting sequence with TTCN PAM
cgcagcaccuagccuguccc

SEQ ID NO: 3925 - RNA, 20 nt, Artificial Sequence
  targeting sequence with TTCN PAM
gugagacuuggcuccucuug

SEQ ID NO: 3926 - RNA, 20 nt, Artificial Sequence
  targeting sequence with TTCN PAM
gcucaggggugagagcaggu

SEQ ID NO: 3927 - RNA, 20 nt, Artificial Sequence
  targeting sequence with TTCN PAM
ggccacucuggagcagcagc

SEQ ID NO: 3928 - RNA, 20 nt, Artificial Sequence
  targeting sequence with TTCN PAM
ugggagaggccugguucucu

SEQ ID NO: 3929 - RNA, 20 nt, Artificial Sequence
  targeting sequence with TTCN PAM
cugggccugucccucucucc

SEQ ID NO: 3930 - RNA, 20 nt, Artificial Sequence
  targeting sequence with TTCN PAM
uuccuuccucccuuccugaa

SEQ ID NO: 3931 - RNA, 20 nt, Artificial Sequence
  targeting sequence with TTCN PAM
uuccucccuuccugaaacug

SEQ ID NO: 3932 - RNA, 20 nt, Artificial Sequence
  targeting sequence with TTCN PAM
ucccuuccugaaacugcguc

SEQ ID NO: 3933 - RNA, 20 nt, Artificial Sequence
  targeting sequence with TTCN PAM
ugaaacugcguccuccaaau

SEQ ID NO: 3934 - RNA, 20 nt, Artificial Sequence
  targeting sequence with TTCN PAM
ggaagggaggaaggaaggaa

SEQ ID NO: 3935 - RNA, 20 nt, Artificial Sequence
  targeting sequence with TTCN PAM
acagccucuggcagcguuuc

SEQ ID NO: 3936 - RNA, 20 nt, Artificial Sequence
  targeting sequence with TTCN PAM
gucccuuucuggccuugacu

SEQ ID NO: 3937 - RNA, 20 nt, Artificial Sequence
  targeting sequence with TTCN PAM
ggccuugacuggaaggcccc

SEQ ID NO: 3938 - RNA, 20 nt, Artificial Sequence
  targeting sequence with TTCN PAM
agucaaggccagaaagggac

SEQ ID NO: 3939 - RNA, 20 nt, Artificial Sequence
  targeting sequence with TTCN PAM
ccccgccugagagggguagg

SEQ ID NO: 3940 - RNA, 20 nt, Artificial Sequence
  targeting sequence with TTCN PAM
cuccuccauaaacgcaguca

SEQ ID NO: 3941 - RNA, 20 nt, Artificial Sequence
  targeting sequence with TTCN PAM
ggcaacgacagaccacauac

SEQ ID NO: 3942 - RNA, 20 nt, Artificial Sequence
  targeting sequence with TTCN PAM
auaagauuacaacagagcug

SEQ ID NO: 3943 - RNA, 20 nt, Artificial Sequence
  targeting sequence with TTCN PAM
cagcucuguuguaaucuuau

SEQ ID NO: 3944 - RNA, 20 nt, Artificial Sequence
  targeting sequence with TTCN PAM
ggccaucugggcguauacgu

SEQ ID NO: 3945 - RNA, 20 nt, Artificial Sequence
  targeting sequence with TTCN PAM
guuacuucaggccaucuggg

SEQ ID NO: 3946 - RNA, 20 nt, Artificial Sequence
  targeting sequence with TTCN PAM
ucaguuacuucaggccaucu

SEQ ID NO: 3947 - RNA, 20 nt, Artificial Sequence
  targeting sequence with TTCN PAM
uuugugauucuucaguuacu

SEQ ID NO: 3948 - RNA, 20 nt, Artificial Sequence
  targeting sequence with TTCN PAM
cuucuuuugugauucuucag

SEQ ID NO: 3949 - RNA, 20 nt, Artificial Sequence
  targeting sequence with TTCN PAM
accacaaaagaaguguaaau

SEQ ID NO: 3950 - RNA, 20 nt, Artificial Sequence
  targeting sequence with TTCN PAM
uuugugguggaaugucauca

SEQ ID NO: 3951 - RNA, 20 nt, Artificial Sequence
  targeting sequence with TTCN PAM
caagguaaugucaucaguua

SEQ ID NO: 3952 - RNA, 20 nt, Artificial Sequence
  targeting sequence with TTCN PAM
ugguucauccuggcucaaaa

SEQ ID NO: 3953 - RNA, 20 nt, Artificial Sequence
  targeting sequence with TTCN PAM
uccuggcucaaaaagcaccu

SEQ ID NO: 3954 - RNA, 20 nt, Artificial Sequence
  targeting sequence with TTCN PAM
cuggcggguaggaguggggg

SEQ ID NO: 3955 - RNA, 20 nt, Artificial Sequence
  targeting sequence with TTCN PAM
uuuaccuacccaaauccuau

SEQ ID NO: 3956 - RNA, 20 nt, Artificial Sequence
  targeting sequence with TTCN PAM
cugacucucuuuuuggacuc

SEQ ID NO: 3957 - RNA, 20 nt, Artificial Sequence
  targeting sequence with TTCN PAM
ccugggugcaggcgggcuga

SEQ ID NO: 3958 - RNA, 20 nt, Artificial Sequence
  targeting sequence with TTCN PAM
cacggaugcacauguaauuu

SEQ ID NO: 3959 - RNA, 20 nt, Artificial Sequence
  targeting sequence with TTCN PAM
ccaaauuacaugugcauccg

SEQ ID NO: 3960 - RNA, 20 nt, Artificial Sequence
  targeting sequence with TTCN PAM
cauggagcaaagagcaggag

SEQ ID NO: 3961 - RNA, 20 nt, Artificial Sequence
  targeting sequence with TTCN PAM
ugggcuggucggucugagga

SEQ ID NO: 3962 - RNA, 20 nt, Artificial Sequence
  targeting sequence with TTCN PAM
aguccgguaagcugccucuu

SEQ ID NO: 3963 - RNA, 20 nt, Artificial Sequence
  targeting sequence with TTCN PAM
ccaaccucccucacuauccc

SEQ ID NO: 3964 - RNA, 20 nt, Artificial Sequence
  targeting sequence with TTCN PAM
ccuuucaaucuuggcgccac

SEQ ID NO: 3965 - RNA, 20 nt, Artificial Sequence
  targeting sequence with TTCN PAM
aucuuggcgccacacuucaa

SEQ ID NO: 3966 - RNA, 20 nt, Artificial Sequence
  targeting sequence with TTCN PAM
aucucucccuucucuuaauu

SEQ ID NO: 3967 - RNA, 20 nt, Artificial Sequence
  targeting sequence with TTCN PAM
cuuaauuucaauuucuuuca

SEQ ID NO: 3968 - RNA, 20 nt, Artificial Sequence
  targeting sequence with TTCN PAM
auuucuuucauuuuuuggua

SEQ ID NO: 3969 - RNA, 20 nt, Artificial Sequence
  targeting sequence with TTCN PAM
uucauuuuuugguagagaca

SEQ ID NO: 3970 - RNA, 20 nt, Artificial Sequence
  targeting sequence with TTCN PAM
uuuuuugguagagacaaaag

SEQ ID NO: 3971 - RNA, 20 nt, Artificial Sequence
  targeting sequence with TTCN PAM
uggauaaaacaugucucuuu

SEQ ID NO: 3972 - RNA, 20 nt, Artificial Sequence
  targeting sequence with TTCN PAM
caguccgugaccggcaccgg

SEQ ID NO: 3973 - RNA, 20 nt, Artificial Sequence
  targeting sequence with TTCN PAM
cuugguguuuaaucauugca

SEQ ID NO: 3974 - RNA, 20 nt, Artificial Sequence
  targeting sequence with TTCN PAM
agggugucagaccacgcagg

SEQ ID NO: 3975 - RNA, 20 nt, Artificial Sequence
  targeting sequence with TTCN PAM
cccuuagcggcaagucccgc

SEQ ID NO: 3976 - RNA, 20 nt, Artificial Sequence
  targeting sequence with TTCN PAM
uagggggcaaggacccccca

SEQ ID NO: 3977 - RNA, 20 nt, Artificial Sequence
  targeting sequence with TTCN PAM
gcaccccaaccucuuaucuc

SEQ ID NO: 3978 - RNA, 20 nt, Artificial Sequence
  targeting sequence with TTCN PAM
gcacccugaccucuuaucuc

SEQ ID NO: 3979 - RNA, 20 nt, Artificial Sequence
  targeting sequence with TTCN PAM
gugucccaacccccucucug

SEQ ID NO: 3980 - RNA, 20 nt, Artificial Sequence
  targeting sequence with TTCN PAM
ggagggcaagaaccccacuc

SEQ ID NO: 3981 - RNA, 20 nt, Artificial Sequence
  targeting sequence with TTCN PAM
ugcccuccagaaaagcagag

SEQ ID NO: 3982 - RNA, 20 nt, Artificial Sequence
  targeting sequence with TTCN PAM
caggguuugccuccuucacu

SEQ ID NO: 3983 - RNA, 20 nt, Artificial Sequence
  targeting sequence with TTCN PAM
cuaugggcaaccuuccaccc

SEQ ID NO: 3984 - RNA, 20 nt, Artificial Sequence
  targeting sequence with TTCN PAM
acccuccauuccuccuucuu

SEQ ID NO: 3985 - RNA, 20 nt, Artificial Sequence
  targeting sequence with TTCN PAM
uccuucuucuccuuuagccu

SEQ ID NO: 3986 - RNA, 20 nt, Artificial Sequence
  targeting sequence with TTCN PAM
ucuccuuuagccuguguccu

SEQ ID NO: 3987 - RNA, 20 nt, Artificial Sequence
  targeting sequence with TTCN PAM
ccuuuagccuguguccuuaa

SEQ ID NO: 3988 - RNA, 20 nt, Artificial Sequence
  targeting sequence with TTCN PAM
uaaggacacaggcuaaagga

SEQ ID NO: 3989 - RNA, 20 nt, Artificial Sequence
  targeting sequence with TTCN PAM
acucacaccugaccuaaaac

SEQ ID NO: 3990 - RNA, 20 nt, Artificial Sequence
  targeting sequence with TTCN PAM
ucugcaacaccacuuggccc

SEQ ID NO: 3991 - RNA, 20 nt, Artificial Sequence
  targeting sequence with TTCN PAM
gcaacaccacuuggccccaa

SEQ ID NO: 3992 - RNA, 20 nt, Artificial Sequence
  targeting sequence with TTCN PAM
ggccauuuagggccauuguc

SEQ ID NO: 3993 - RNA, 20 nt, Artificial Sequence
  targeting sequence with TTCN PAM
gcauccuacaagaccuaaau

SEQ ID NO: 3994 - RNA, 20 nt, Artificial Sequence
  targeting sequence with TTCN PAM
acaaaaauuauuuaggucuu

SEQ ID NO: 3995 - RNA, 20 nt, Artificial Sequence
  targeting sequence with TTCN PAM
cacuucguucccucccuagc

SEQ ID NO: 3996 - RNA, 20 nt, Artificial Sequence
  targeting sequence with TTCN PAM
uucccucccuagccucuguu

SEQ ID NO: 3997 - RNA, 20 nt, Artificial Sequence
  targeting sequence with TTCN PAM
cucccuagccucuguuccca

SEQ ID NO: 3998 - RNA, 20 nt, Artificial Sequence
  targeting sequence with TTCN PAM
caaugcaauuccucccagau

SEQ ID NO: 3999 - RNA, 20 nt, Artificial Sequence
  targeting sequence with TTCN PAM
ucccagauccuccuucuuuc

SEQ ID NO: 4000 - RNA, 20 nt, Artificial Sequence
  targeting sequence with TTCN PAM
uucccucccgccuguccccu

SEQ ID NO: 4001 - RNA, 20 nt, Artificial Sequence
  targeting sequence with TTCN PAM
cucccgccuguccccucagu

SEQ ID NO: 4002 - RNA, 20 nt, Artificial Sequence
  targeting sequence with TTCN PAM
agucuuccuuuucuacagac

SEQ ID NO: 4003 - RNA, 20 nt, Artificial Sequence
  targeting sequence with TTCN PAM
uuuucuacagacccaucuga

SEQ ID NO: 4004 - RNA, 20 nt, Artificial Sequence
  targeting sequence with TTCN PAM
acagacccaucugaccuuuc

SEQ ID NO: 4005 - RNA, 20 nt, Artificial Sequence
  targeting sequence with TTCN PAM
ccuccuccccaggcugcuca

SEQ ID NO: 4006 - RNA, 20 nt, Artificial Sequence
  targeting sequence with TTCN PAM
uccucagccuccgcuccucc

SEQ ID NO: 4007 - RNA, 20 nt, Artificial Sequence
  targeting sequence with TTCN PAM
ucagccuccgcuccuccacc

SEQ ID NO: 4008 - RNA, 20 nt, Artificial Sequence
  targeting sequence with TTCN PAM
uuccgugacuggcccucccc

SEQ ID NO: 4009 - RNA, 20 nt, Artificial Sequence
  targeting sequence with TTCN PAM
gugacuggcccucccccacc

SEQ ID NO: 4010 - RNA, 20 nt, Artificial Sequence
  targeting sequence with TTCN PAM
uuaucccaaaucagauagca

SEQ ID NO: 4011 - RNA, 20 nt, Artificial Sequence
  targeting sequence with TTCN PAM
ucaaauauaaaaauccagcc

SEQ ID NO: 4012 - RNA, 20 nt, Artificial Sequence
  targeting sequence with TTCN PAM
ugacucguuuggcagcaacc

SEQ ID NO: 4013 - RNA, 20 nt, Artificial Sequence
  targeting sequence with TTCN PAM
caauacucauuuuauuaccc

SEQ ID NO: 4014 - RNA, 20 nt, Artificial Sequence
  targeting sequence with TTCN PAM
agcccucaaaccucacaaca

SEQ ID NO: 4015 - RNA, 20 nt, Artificial Sequence
  targeting sequence with TTCN PAM
aggugugcaauaauagaaaa

SEQ ID NO: 4016 - RNA, 20 nt, Artificial Sequence
  targeting sequence with TTCN PAM
auuauugcacaccuugaagg

SEQ ID NO: 4017 - RNA, 20 nt, Artificial Sequence
  targeting sequence with TTCN PAM
uugccuccacugugagacaa

SEQ ID NO: 4018 - RNA, 20 nt, Artificial Sequence
  targeting sequence with TTCN PAM
ugugugcuggagauguggcu

SEQ ID NO: 4019 - RNA, 20 nt, Artificial Sequence
  targeting sequence with TTCN PAM
aaacgccugaaccacagcgg

SEQ ID NO: 4020 - RNA, 20 nt, Artificial Sequence
  targeting sequence with TTCN PAM
ggcguuuggaaguucuugug

SEQ ID NO: 4021 - RNA, 20 nt, Artificial Sequence
  targeting sequence with TTCN PAM
uccagaaccuccucccccag

SEQ ID NO: 4022 - RNA, 20 nt, Artificial Sequence
  targeting sequence with TTCN PAM
ggaggaacgccuggccgcug

SEQ ID NO: 4023 - RNA, 20 nt, Artificial Sequence
  targeting sequence with TTCN PAM
ggcacuuguagcaaacuccu

SEQ ID NO: 4024 - RNA, 20 nt, Artificial Sequence
  targeting sequence with TTCN PAM
uuggcccaguggccagauuu

SEQ ID NO: 4025 - RNA, 20 nt, Artificial Sequence
  targeting sequence with TTCN PAM
ucuuaagccgcgucccaucu

SEQ ID NO: 4026 - RNA, 20 nt, Artificial Sequence
  targeting sequence with TTCN PAM
guggggucccacacagaugg

SEQ ID NO: 4027 - RNA, 20 nt, Artificial Sequence
  targeting sequence with TTCN PAM
acucaccuggcagccacucc

SEQ ID NO: 4028 - RNA, 20 nt, Artificial Sequence
  targeting sequence with TTCN PAM
aggggcucugggaguggcug

SEQ ID NO: 4029 - RNA, 20 nt, Artificial Sequence
  targeting sequence with TTCN PAM
cagaucuucucggcuuagcg

SEQ ID NO: 4030 - RNA, 20 nt, Artificial Sequence
  targeting sequence with TTCN PAM
cggcuuagcggcugaagacu

SEQ ID NO: 4031 - RNA, 20 nt, Artificial Sequence
  targeting sequence with TTCN PAM
gccgcuaagccgagaagauc

SEQ ID NO: 4032 - RNA, 20 nt, Artificial Sequence
  targeting sequence with TTCN PAM
gaggcgaucgggcaguguca

SEQ ID NO: 4033 - RNA, 20 nt, Artificial Sequence
  targeting sequence with TTCN PAM
acugugagaguuacccaaag

SEQ ID NO: 4034 - RNA, 20 nt, Artificial Sequence
  targeting sequence with TTCN PAM
uaaucaauacggaggcuacu

SEQ ID NO: 4035 - RNA, 20 nt, Artificial Sequence
  targeting sequence with TTCN PAM
uuucaagggccuguuucccu

SEQ ID NO: 4036 - RNA, 20 nt, Artificial Sequence
  targeting sequence with TTCN PAM
agggccuguuucccuugccu

SEQ ID NO: 4037 - RNA, 20 nt, Artificial Sequence
  targeting sequence with TTCN PAM
cuugccuccauaacuguugu

SEQ ID NO: 4038 - RNA, 20 nt, Artificial Sequence
  targeting sequence with TTCN PAM
aaaccucuuaaaacucccca

SEQ ID NO: 4039 - RNA, 20 nt, Artificial Sequence
  targeting sequence with TTCN PAM
cuuauuaggcugagacacuu

SEQ ID NO: 4040 - RNA, 20 nt, Artificial Sequence
  targeting sequence with TTCN PAM
cugacuauuccuggacuaca

SEQ ID NO: 4041 - RNA, 20 nt, Artificial Sequence
  targeting sequence with TTCN PAM
uggacuacagcuauaucuca

SEQ ID NO: 4042 - RNA, 20 nt, Artificial Sequence
  targeting sequence with TTCN PAM
ucccaauccaaagccuccuu

SEQ ID NO: 4043 - RNA, 20 nt, Artificial Sequence
  targeting sequence with TTCN PAM
caauccaaagccuccuuugu

SEQ ID NO: 4044 - RNA, 20 nt, Artificial Sequence
  targeting sequence with TTCN PAM
cccauuuuaccuguccuaaa

SEQ ID NO: 4045 - RNA, 20 nt, Artificial Sequence
  targeting sequence with TTCN PAM
ggaucugcgccuuaucaacc

SEQ ID NO: 4046 - RNA, 20 nt, Artificial Sequence
  targeting sequence with TTCN PAM
guucuggaucucaaacaugc

SEQ ID NO: 4047 - RNA, 20 nt, Artificial Sequence
  targeting sequence with TTCN PAM
ggaucucaaacaugcuuucu

SEQ ID NO: 4048 - RNA, 20 nt, Artificial Sequence
  targeting sequence with TTCN PAM
uuacuauuccuuugcacccg

SEQ ID NO: 4049 - RNA, 20 nt, Artificial Sequence
  targeting sequence with TTCN PAM
uuugcacccgucaucccagc

SEQ ID NO: 4050 - RNA, 20 nt, Artificial Sequence
  targeting sequence with TTCN PAM
cuuucacuuugacugacccu

SEQ ID NO: 4051 - RNA, 20 nt, Artificial Sequence
  targeting sequence with TTCN PAM
cuuugacugacccugacacc

SEQ ID NO: 4052 - RNA, 20 nt, Artificial Sequence
  targeting sequence with TTCN PAM
cagacagcccccauuacuuc

SEQ ID NO: 4053 - RNA, 20 nt, Artificial Sequence
  targeting sequence with TTCN PAM
aucaagcccaaauuucuucc

SEQ ID NO: 4054 - RNA, 20 nt, Artificial Sequence
  targeting sequence with TTCN PAM
uccucaucuguuaccuaucu

SEQ ID NO: 4055 - RNA, 20 nt, Artificial Sequence
  targeting sequence with TTCN PAM
ucaucuguuaccuaucuugg

SEQ ID NO: 4056 - RNA, 20 nt, Artificial Sequence
  targeting sequence with TTCN PAM
cauaaaaacacaugugcucu

SEQ ID NO: 4057 - RNA, 20 nt, Artificial Sequence
  targeting sequence with TTCN PAM
acaaaacaacaacuccuuuc

SEQ ID NO: 4058 - RNA, 20 nt, Artificial Sequence
  targeting sequence with TTCN PAM
uuccuaggcaugguuagcgu

SEQ ID NO: 4059 - RNA, 20 nt, Artificial Sequence
  targeting sequence with TTCN PAM
uaggcaugguuagcgugguc

SEQ ID NO: 4060 - RNA, 20 nt, Artificial Sequence
  targeting sequence with TTCN PAM
gaccacgcuaaccaugccua

SEQ ID NO: 4061 - RNA, 20 nt, Artificial Sequence
  targeting sequence with TTCN PAM
uacacaagagccaggaccac

SEQ ID NO: 4062 - RNA, 20 nt, Artificial Sequence
  targeting sequence with TTCN PAM
guccaaacaacuugaccuua

SEQ ID NO: 4063 - RNA, 20 nt, Artificial Sequence
  targeting sequence with TTCN PAM
cauaacuuccaaaaucuauu

SEQ ID NO: 4064 - RNA, 20 nt, Artificial Sequence
  targeting sequence with TTCN PAM
aaaaucuauuuucuuccuca

SEQ ID NO: 4065 - RNA, 20 nt, Artificial Sequence
  targeting sequence with TTCN PAM
uccucauaccugacacauau

SEQ ID NO: 4066 - RNA, 20 nt, Artificial Sequence
  targeting sequence with TTCN PAM
ucauaccugacacauauacu

SEQ ID NO: 4067 - RNA, 20 nt, Artificial Sequence
  targeting sequence with TTCN PAM
gcuucccggcuccuucagcu

SEQ ID NO: 4068 - RNA, 20 nt, Artificial Sequence
  targeting sequence with TTCN PAM
cggcuccuucagcuguacuc

SEQ ID NO: 4069 - RNA, 20 nt, Artificial Sequence
  targeting sequence with TTCN PAM
gcuguacucacucuuuguua

SEQ ID NO: 4070 - RNA, 20 nt, Artificial Sequence
  targeting sequence with TTCN PAM
uggcccagaccucaaucugg

SEQ ID NO: 4071 - RNA, 20 nt, Artificial Sequence
  targeting sequence with TTCN PAM
ugauaccacaccugaccccc

SEQ ID NO: 4072 - RNA, 20 nt, Artificial Sequence
  targeting sequence with TTCN PAM
ccccauuuccccauauuucc

SEQ ID NO: 4073 - RNA, 20 nt, Artificial Sequence
  targeting sequence with TTCN PAM
ccauauuuccuucuuuccug

SEQ ID NO: 4074 - RNA, 20 nt, Artificial Sequence
  targeting sequence with TTCN PAM
uucuuuccuguuccucaccc

SEQ ID NO: 4075 - RNA, 20 nt, Artificial Sequence
  targeting sequence with TTCN PAM
uuccuguuccucacccugau

SEQ ID NO: 4076 - RNA, 20 nt, Artificial Sequence
  targeting sequence with TTCN PAM
uguuccucacccugaucaug

SEQ ID NO: 4077 - RNA, 20 nt, Artificial Sequence
  targeting sequence with TTCN PAM
ucacccugaucaugcuugau

SEQ ID NO: 4078 - RNA, 20 nt, Artificial Sequence
  targeting sequence with TTCN PAM
accaggccuaaucgccacac

SEQ ID NO: 4079 - RNA, 20 nt, Artificial Sequence
  targeting sequence with TTCN PAM
aagaggugggcuaguggcuu

SEQ ID NO: 4080 - RNA, 20 nt, Artificial Sequence
  targeting sequence with TTCN PAM
uuuccaucauggaaaucuau

SEQ ID NO: 4081 - RNA, 20 nt, Artificial Sequence
  targeting sequence with TTCN PAM
aucauggaaaucuauccuca

SEQ ID NO: 4082 - RNA, 20 nt, Artificial Sequence
  targeting sequence with TTCN PAM
augauggaaaggaaaugaga

SEQ ID NO: 4083 - RNA, 20 nt, Artificial Sequence
  targeting sequence with TTCN PAM
uugaggauagauuuccauga

SEQ ID NO: 4084 - RNA, 20 nt, Artificial Sequence
  targeting sequence with TTCN PAM
caguguuccaucugcuauuc

SEQ ID NO: 4085 - RNA, 20 nt, Artificial Sequence
  targeting sequence with TTCN PAM
aucugcuauucuacuacucc

SEQ ID NO: 4086 - RNA, 20 nt, Artificial Sequence
  targeting sequence with TTCN PAM
acuacuccucagggauuauu

SEQ ID NO: 4087 - RNA, 20 nt, Artificial Sequence
  targeting sequence with TTCN PAM
ggaccccucccuucccuaca

SEQ ID NO: 4088 - RNA, 20 nt, Artificial Sequence
  targeting sequence with TTCN PAM
cuacacaucaagcucgagga

SEQ ID NO: 4089 - RNA, 20 nt, Artificial Sequence
  targeting sequence with TTCN PAM
uacagggucugagaaggcca

SEQ ID NO: 4090 - RNA, 20 nt, Artificial Sequence
  targeting sequence with TTCN PAM
cagacccuguaggaaaggcc

SEQ ID NO: 4091 - RNA, 20 nt, Artificial Sequence
  targeting sequence with TTCN PAM
cuucugucagacacaauucc

SEQ ID NO: 4092 - RNA, 20 nt, Artificial Sequence
  targeting sequence with TTCN PAM
gucagacacaauuccucagu

SEQ ID NO: 4093 - RNA, 20 nt, Artificial Sequence
  targeting sequence with TTCN PAM
ucaguuuagccuucccaccu

SEQ ID NO: 4094 - RNA, 20 nt, Artificial Sequence
  targeting sequence with TTCN PAM
caccucaauacagucugaua

SEQ ID NO: 4095 - RNA, 20 nt, Artificial Sequence
  targeting sequence with TTCN PAM
ggcucuuaguauucagugaa

SEQ ID NO: 4096 - RNA, 20 nt, Artificial Sequence
  targeting sequence with TTCN PAM
gugaaaccuuuauaucccuu

SEQ ID NO: 4097 - RNA, 20 nt, Artificial Sequence
  targeting sequence with TTCN PAM
cugaauacuaagagccugaa

SEQ ID NO: 4098 - RNA, 20 nt, Artificial Sequence
  targeting sequence with TTCN PAM
agaaaaguagaacagacuaa

SEQ ID NO: 4099 - RNA, 20 nt, Artificial Sequence
  targeting sequence with TTCN PAM
ugaagacggaggaccguaag

SEQ ID NO: 4100 - RNA, 20 nt, Artificial Sequence
  targeting sequence with TTCN PAM
acuuuucuugaagacggagg

SEQ ID NO: 4101 - RNA, 20 nt, Artificial Sequence
  targeting sequence with TTCN PAM
cuucucagaauucaggccug

SEQ ID NO: 4102 - RNA, 20 nt, Artificial Sequence
  targeting sequence with TTCN PAM
cagaauucaggccuguccuc

SEQ ID NO: 4103 - RNA, 20 nt, Artificial Sequence
  targeting sequence with TTCN PAM
gagaagggaaagugauaaaa

SEQ ID NO: 4104 - RNA, 20 nt, Artificial Sequence
  targeting sequence with TTCN PAM
ggccuguccucggaaugcua

SEQ ID NO: 4105 - RNA, 20 nt, Artificial Sequence
  targeting sequence with TTCN PAM
gaggacaggccugaauucug

SEQ ID NO: 4106 - RNA, 20 nt, Artificial Sequence
  targeting sequence with TTCN PAM
agacaccagaccaacuugga

SEQ ID NO: 4107 - RNA, 20 nt, Artificial Sequence
  targeting sequence with TTCN PAM
ggggcacaguccaaguuggu

SEQ ID NO: 4108 - RNA, 20 nt, Artificial Sequence
  targeting sequence with TTCN PAM
gucuagucauacuccuauuc

SEQ ID NO: 4109 - RNA, 20 nt, Artificial Sequence
  targeting sequence with TTCN PAM
ccguucucaacuacucauac

SEQ ID NO: 4110 - RNA, 20 nt, Artificial Sequence
  targeting sequence with TTCN PAM
caacuacucauacaugcccu

SEQ ID NO: 4111 - RNA, 20 nt, Artificial Sequence
  targeting sequence with TTCN PAM
ccaagccaucacagcugaua

SEQ ID NO: 4112 - RNA, 20 nt, Artificial Sequence
  targeting sequence with TTCN PAM
agaguuaagaguggcaguuu

SEQ ID NO: 4113 - RNA, 20 nt, Artificial Sequence
  targeting sequence with TTCN PAM
gcauaguccugccagcaaag

SEQ ID NO: 4114 - RNA, 20 nt, Artificial Sequence
  targeting sequence with TTCN PAM
uaguccuuuuauaccuguuu

SEQ ID NO: 4115 - RNA, 20 nt, Artificial Sequence
  targeting sequence with TTCN PAM
ccuucucuuauuccauuuag

SEQ ID NO: 4116 - RNA, 20 nt, Artificial Sequence
  targeting sequence with TTCN PAM
cuuauuccauuuaguuuuuc

SEQ ID NO: 4117 - RNA, 20 nt, Artificial Sequence
  targeting sequence with TTCN PAM
auuuaguuuuucaauucaua

SEQ ID NO: 4118 - RNA, 20 nt, Artificial Sequence
  targeting sequence with TTCN PAM
auucauacaaaaccguaucc

SEQ ID NO: 4119 - RNA, 20 nt, Artificial Sequence
  targeting sequence with TTCN PAM
uacaaaaccguauccaggcc

SEQ ID NO: 4120 - RNA, 20 nt, Artificial Sequence
  targeting sequence with TTCN PAM
auacgacaaacguuucuucu

SEQ ID NO: 4121 - RNA, 20 nt, Artificial Sequence
  targeting sequence with TTCN PAM
ucuaacauccccacaauauc

SEQ ID NO: 4122 - RNA, 20 nt, Artificial Sequence
  targeting sequence with TTCN PAM
aacauccccacaauaucacc

SEQ ID NO: 4123 - RNA, 20 nt, Artificial Sequence
  targeting sequence with TTCN PAM
gcuuaaucucucccauucua

SEQ ID NO: 4124 - RNA, 20 nt, Artificial Sequence
  targeting sequence with TTCN PAM
agguucccacgccgccccua

SEQ ID NO: 4125 - RNA, 20 nt, Artificial Sequence
  targeting sequence with TTCN PAM
cacgccgccccuaaucccgc

SEQ ID NO: 4126 - RNA, 20 nt, Artificial Sequence
  targeting sequence with TTCN PAM
agcgggauuaggggcggcgu

SEQ ID NO: 4127 - RNA, 20 nt, Artificial Sequence
  targeting sequence with TTCN PAM
cagggcugcuucaagcggga

SEQ ID NO: 4128 - RNA, 20 nt, Artificial Sequence
  targeting sequence with TTCN PAM
cucuccauaccaccccccaa

SEQ ID NO: 4129 - RNA, 20 nt, Artificial Sequence
  targeting sequence with TTCN PAM
ccgccccaacacuucaacac

SEQ ID NO: 4130 - RNA, 20 nt, Artificial Sequence
  targeting sequence with TTCN PAM
acacuauuuuauuuuucuua

SEQ ID NO: 4131 - RNA, 20 nt, Artificial Sequence
  targeting sequence with TTCN PAM
uauuaauauaagaaggcagg

SEQ ID NO: 4132 - RNA, 20 nt, Artificial Sequence
  targeting sequence with TTCN PAM
uauauuaauaagaaaaauaa

SEQ ID NO: 4133 - RNA, 20 nt, Artificial Sequence
  targeting sequence with TTCN PAM
ugccuucuuauauuaauaag

SEQ ID NO: 4134 - RNA, 20 nt, Artificial Sequence
  targeting sequence with TTCN PAM
ggccaucugggcguauacau

SEQ ID NO: 4135 - RNA, 20 nt, Artificial Sequence
  targeting sequence with TTCN PAM
guuacuucaggccaucuggg

SEQ ID NO: 4136 - RNA, 20 nt, Artificial Sequence
  targeting sequence with TTCN PAM
ucaguuacuucaggccaucu

SEQ ID NO: 4137 - RNA, 20 nt, Artificial Sequence
  targeting sequence with TTCN PAM
uuugugauucuucaguuacu

SEQ ID NO: 4138 - RNA, 20 nt, Artificial Sequence
  targeting sequence with TTCN PAM
cuucuuuugugauucuucag

SEQ ID NO: 4139 - RNA, 20 nt, Artificial Sequence
  targeting sequence with TTCN PAM
accacaaaagaaguguaaau

SEQ ID NO: 4140 - RNA, 20 nt, Artificial Sequence
  targeting sequence with TTCN PAM
uuugugguggaaugucauca

SEQ ID NO: 4141 - RNA, 20 nt, Artificial Sequence
  targeting sequence with TTCN PAM
caagguaaugucaucaguua

SEQ ID NO: 4142 - RNA, 20 nt, Artificial Sequence
  targeting sequence with TTCN PAM
cugguucauccuggcucaaa

SEQ ID NO: 4143 - RNA, 20 nt, Artificial Sequence
  targeting sequence with TTCN PAM
uccuggcucaaaaagcaccc

SEQ ID NO: 4144 - RNA, 20 nt, Artificial Sequence
  targeting sequence with TTCN PAM
uuuaccuacccaaauccuau

SEQ ID NO: 4145 - RNA, 20 nt, Artificial Sequence
  targeting sequence with TTCN PAM
cugacucucuuuucggacuc

SEQ ID NO: 4146 - RNA, 20 nt, Artificial Sequence
  targeting sequence with TTCN PAM
gacucagcccaccugcaccc

SEQ ID NO: 4147 - RNA, 20 nt, Artificial Sequence
  targeting sequence with TTCN PAM
ccugggugcaggugggcuga

SEQ ID NO: 4148 - RNA, 20 nt, Artificial Sequence
  targeting sequence with TTCN PAM
cacggacgcgcaugaaaucu

SEQ ID NO: 4149 - RNA, 20 nt, Artificial Sequence
  targeting sequence with TTCN PAM
ugcgcguccgugugaagaga

SEQ ID NO: 4150 - RNA, 20 nt, Artificial Sequence
  targeting sequence with TTCN PAM
ccagauuucaugcgcguccg

SEQ ID NO: 4151 - RNA, 20 nt, Artificial Sequence
  targeting sequence with TTCN PAM
cauucacuccccacucacuc

SEQ ID NO: 4152 - RNA, 20 nt, Artificial Sequence
  targeting sequence with TTCN PAM
cuccccacucacucacugac

SEQ ID NO: 4153 - RNA, 20 nt, Artificial Sequence
  targeting sequence with TTCN PAM
aguccugcaagcucuguuca

SEQ ID NO: 4154 - RNA, 20 nt, Artificial Sequence
  targeting sequence with TTCN PAM
ugcuaagugcccuacacaga

SEQ ID NO: 4155 - RNA, 20 nt, Artificial Sequence
  targeting sequence with TTCN PAM
cuuuuacauuuuauuuuuac

SEQ ID NO: 4156 - RNA, 20 nt, Artificial Sequence
  targeting sequence with TTCN PAM
auguuuagauuuuuuuuuuu

SEQ ID NO: 4157 - RNA, 20 nt, Artificial Sequence
  targeting sequence with TTCN PAM
ugccauucuccugccucagc

SEQ ID NO: 4158 - RNA, 20 nt, Artificial Sequence
  targeting sequence with TTCN PAM
ccugccucagccucccgagu

SEQ ID NO: 4159 - RNA, 20 nt, Artificial Sequence
  targeting sequence with TTCN PAM
acuaaaaauacaaaaaacca

SEQ ID NO: 4160 - RNA, 20 nt, Artificial Sequence
  targeting sequence with TTCN PAM
ccauguuagccaggaugguc

SEQ ID NO: 4161 - RNA, 20 nt, Artificial Sequence
  targeting sequence with TTCN PAM
gcacugugcuguacaagucu

SEQ ID NO: 4162 - RNA, 20 nt, Artificial Sequence
  targeting sequence with TTCN PAM
caccaugacaaaauugccag

SEQ ID NO: 4163 - RNA, 20 nt, Artificial Sequence
  targeting sequence with TTCN PAM
auacagucaugcauccauau

SEQ ID NO: 4164 - RNA, 20 nt, Artificial Sequence
  targeting sequence with TTCN PAM
ugucaucagauuacaccgga

SEQ ID NO: 4165 - RNA, 20 nt, Artificial Sequence
  targeting sequence with TTCN PAM
gguguaaucugaugacagga

SEQ ID NO: 4166 - RNA, 20 nt, Artificial Sequence
  targeting sequence with TTCN PAM
ccugcugggggauuucagcg

SEQ ID NO: 4167 - RNA, 20 nt, Artificial Sequence
  targeting sequence with TTCN PAM
gcguguuucuagagagucgg

SEQ ID NO: 4168 - RNA, 20 nt, Artificial Sequence
  targeting sequence with TTCN PAM
agagagucgguugcacgcuc

SEQ ID NO: 4169 - RNA, 20 nt, Artificial Sequence
  targeting sequence with TTCN PAM
accuccagagaccuugccug

SEQ ID NO: 4170 - RNA, 20 nt, Artificial Sequence
  targeting sequence with TTCN PAM
gccuuccauucccaccugca

SEQ ID NO: 4171 - RNA, 20 nt, Artificial Sequence
  targeting sequence with TTCN PAM
auucccaccugcauacucuu

SEQ ID NO: 4172 - RNA, 20 nt, Artificial Sequence
  targeting sequence with TTCN PAM
caccugcauacucuugcccu

SEQ ID NO: 4173 - RNA, 20 nt, Artificial Sequence
  targeting sequence with TTCN PAM
ggaggagcuuguuaucguag

SEQ ID NO: 4174 - RNA, 20 nt, Artificial Sequence
  targeting sequence with TTCN PAM
aaacacgcccuuucugacca

SEQ ID NO: 4175 - RNA, 20 nt, Artificial Sequence
  targeting sequence with TTCN PAM
gaccaccacuuuccuuuucu

SEQ ID NO: 4176 - RNA, 20 nt, Artificial Sequence
  targeting sequence with TTCN PAM
uuuucucccaacuccaauau

SEQ ID NO: 4177 - RNA, 20 nt, Artificial Sequence
  targeting sequence with TTCN PAM
cccaacuccaauauuuucau

SEQ ID NO: 4178 - RNA, 20 nt, Artificial Sequence
  targeting sequence with TTCN PAM
uugacgccagccuuucacgu

SEQ ID NO: 4179 - RNA, 20 nt, Artificial Sequence
  targeting sequence with TTCN PAM
cgucugccucucacucaccu

SEQ ID NO: 4180 - RNA, 20 nt, Artificial Sequence
  targeting sequence with TTCN PAM
ugguccagucugccauccac

SEQ ID NO: 4181 - RNA, 20 nt, Artificial Sequence
  targeting sequence with TTCN PAM
ccucugugaguacaauaacu

SEQ ID NO: 4182 - RNA, 20 nt, Artificial Sequence
  targeting sequence with TTCN PAM
cucuggcugugcucagccgc

SEQ ID NO: 4183 - RNA, 20 nt, Artificial Sequence
  targeting sequence with TTCN PAM
ggucucacucacaaaccacu

SEQ ID NO: 4184 - RNA, 20 nt, Artificial Sequence
  targeting sequence with TTCN PAM
aaguccauuucucugccuga

SEQ ID NO: 4185 - RNA, 20 nt, Artificial Sequence
  targeting sequence with TTCN PAM
cugccugacuuauuuauuuu

SEQ ID NO: 4186 - RNA, 20 nt, Artificial Sequence
  targeting sequence with TTCN PAM
aagcauguuauuaucaagua

SEQ ID NO: 4187 - RNA, 20 nt, Artificial Sequence
  targeting sequence with TTCN PAM
guaacuauugccauuucaca

SEQ ID NO: 4188 - RNA, 20 nt, Artificial Sequence
  targeting sequence with TTCN PAM
cagacgaagagauagacaca

SEQ ID NO: 4189 - RNA, 20 nt, Artificial Sequence
  targeting sequence with TTCN PAM
ucugugaaauggcaauaguu

SEQ ID NO: 4190 - RNA, 20 nt, Artificial Sequence
  targeting sequence with TTCN PAM
ugugugucuaucucuucguc

SEQ ID NO: 4191 - RNA, 20 nt, Artificial Sequence
  targeting sequence with TTCN PAM
ccuuucuccuuaaaccccca

SEQ ID NO: 4192 - RNA, 20 nt, Artificial Sequence
  targeting sequence with TTCN PAM
ccuuaaacccccaaauccuu

SEQ ID NO: 4193 - RNA, 20 nt, Artificial Sequence
  targeting sequence with TTCN PAM
cccccagccugccuuauagu

SEQ ID NO: 4194 - RNA, 20 nt, Artificial Sequence
  targeting sequence with TTCN PAM
uauuccaaugagaaaauaga

SEQ ID NO: 4195 - RNA, 20 nt, Artificial Sequence
  targeting sequence with TTCN PAM
aaugagaaaauagacucaau

SEQ ID NO: 4196 - RNA, 20 nt, Artificial Sequence
  targeting sequence with TTCN PAM
cauuggaauaggaagcaagg

SEQ ID NO: 4197 - RNA, 20 nt, Artificial Sequence
  targeting sequence with TTCN PAM
cucuuuauugagucuauuuu

SEQ ID NO: 4198 - RNA, 20 nt, Artificial Sequence
  targeting sequence with TTCN PAM
accuuccccugugauuaugg

SEQ ID NO: 4199 - RNA, 20 nt, Artificial Sequence
  targeting sequence with TTCN PAM
ccugugauuauggcugcacc

SEQ ID NO: 4200 - RNA, 20 nt, Artificial Sequence
  targeting sequence with TTCN PAM
accugugcacuaggauccau

SEQ ID NO: 4201 - RNA, 20 nt, Artificial Sequence
  targeting sequence with TTCN PAM
caccuccuaagagaugcucc

SEQ ID NO: 4202 - RNA, 20 nt, Artificial Sequence
  targeting sequence with TTCN PAM
cugucucaacuguaacacuu

SEQ ID NO: 4203 - RNA, 20 nt, Artificial Sequence
  targeting sequence with TTCN PAM
aucagcucugggccaucauc

SEQ ID NO: 4204 - RNA, 20 nt, Artificial Sequence
  targeting sequence with TTCN PAM
ugcuuccccaaggauauagg

SEQ ID NO: 4205 - RNA, 20 nt, Artificial Sequence
  targeting sequence with TTCN PAM
ccaaggauauagggaaaacc

SEQ ID NO: 4206 - RNA, 20 nt, Artificial Sequence
  targeting sequence with TTCN PAM
cuauauccuuggggaagcag

SEQ ID NO: 4207 - RNA, 20 nt, Artificial Sequence
  targeting sequence with TTCN PAM
agguuuucccuauauccuug

SEQ ID NO: 4208 - RNA, 20 nt, Artificial Sequence
  targeting sequence with TTCN PAM
ugcauugucucuacacaggc

SEQ ID NO: 4209 - RNA, 20 nt, Artificial Sequence
  targeting sequence with TTCN PAM
uggugaucuccacauggcua

SEQ ID NO: 4210 - RNA, 20 nt, Artificial Sequence
  targeting sequence with TTCN PAM
gauuuagccauguggagauc

SEQ ID NO: 4211 - RNA, 20 nt, Artificial Sequence
  targeting sequence with TTCN PAM
uuucucaccuugcuuguccc

SEQ ID NO: 4212 - RNA, 20 nt, Artificial Sequence
  targeting sequence with TTCN PAM
caccuugcuugucccguggg

SEQ ID NO: 4213 - RNA, 20 nt, Artificial Sequence
  targeting sequence with TTCN PAM
uccuccuggacaugcucccu

SEQ ID NO: 4214 - RNA, 20 nt, Artificial Sequence
  targeting sequence with TTCN PAM
augacaggggacucacagag

SEQ ID NO: 4215 - RNA, 20 nt, Artificial Sequence
  targeting sequence with TTCN PAM
agcccagcaucuccccuaag

SEQ ID NO: 4216 - RNA, 20 nt, Artificial Sequence
  targeting sequence with TTCN PAM
augugacaccuuggccaucu

SEQ ID NO: 4217 - RNA, 20 nt, Artificial Sequence
  targeting sequence with TTCN PAM
ccagauggccaaggugucac

SEQ ID NO: 4218 - RNA, 20 nt, Artificial Sequence
  targeting sequence with TTCN PAM
gggugcauggguuugagcca

SEQ ID NO: 4219 - RNA, 20 nt, Artificial Sequence
  targeting sequence with TTCN PAM
ccacuaagccacuccucucu

SEQ ID NO: 4220 - RNA, 20 nt, Artificial Sequence
  targeting sequence with TTCN PAM
aaauagcacucacagcaauc

SEQ ID NO: 4221 - RNA, 20 nt, Artificial Sequence
  targeting sequence with TTCN PAM
cuguguccccauucaaaucu

SEQ ID NO: 4222 - RNA, 20 nt, Artificial Sequence
  targeting sequence with TTCN PAM
aaucucagcuugaauuguau

SEQ ID NO: 4223 - RNA, 20 nt, Artificial Sequence
  targeting sequence with TTCN PAM
agcugagauuugaaugggga

SEQ ID NO: 4224 - RNA, 20 nt, Artificial Sequence
  targeting sequence with TTCN PAM
cagaauucccacguguugug

SEQ ID NO: 4225 - RNA, 20 nt, Artificial Sequence
  targeting sequence with TTCN PAM
gggaaauacaauucaagcug

SEQ ID NO: 4226 - RNA, 20 nt, Artificial Sequence
  targeting sequence with TTCN PAM
cacguguugugggagggacc

SEQ ID NO: 4227 - RNA, 20 nt, Artificial Sequence
  targeting sequence with TTCN PAM
auuaccucccccuggguccc

SEQ ID NO: 4228 - RNA, 20 nt, Artificial Sequence
  targeting sequence with TTCN PAM
caugcuauucucaugguagu

SEQ ID NO: 4229 - RNA, 20 nt, Artificial Sequence
  targeting sequence with TTCN PAM
caugguagugaauaagucuc

SEQ ID NO: 4230 - RNA, 20 nt, Artificial Sequence
  targeting sequence with TTCN PAM
cuaccaugagaauagcaugg

SEQ ID NO: 4231 - RNA, 20 nt, Artificial Sequence
  targeting sequence with TTCN PAM
auuuuugcuuccuccucauu

SEQ ID NO: 4232 - RNA, 20 nt, Artificial Sequence
  targeting sequence with TTCN PAM
uccucauuuucucuugccuc

SEQ ID NO: 4233 - RNA, 20 nt, Artificial Sequence
  targeting sequence with TTCN PAM
cuugccuccgccauguaaga

SEQ ID NO: 4234 - RNA, 20 nt, Artificial Sequence
  targeting sequence with TTCN PAM
uacauggcggaggcaagaga

SEQ ID NO: 4235 - RNA, 20 nt, Artificial Sequence
  targeting sequence with TTCN PAM
uuucccgucaugauucugag

SEQ ID NO: 4236 - RNA, 20 nt, Artificial Sequence
  targeting sequence with TTCN PAM
cgucaugauucugagaccuc

SEQ ID NO: 4237 - RNA, 20 nt, Artificial Sequence
  targeting sequence with TTCN PAM
gagaccuccgcagccacgug

SEQ ID NO: 4238 - RNA, 20 nt, Artificial Sequence
  targeting sequence with TTCN PAM
acguggcugcggaggucuca

SEQ ID NO: 4239 - RNA, 20 nt, Artificial Sequence
  targeting sequence with TTCN PAM
uccuagucucagguaugucu

SEQ ID NO: 4240 - RNA, 20 nt, Artificial Sequence
  targeting sequence with TTCN PAM
uagucucagguaugucuuua

SEQ ID NO: 4241 - RNA, 20 nt, Artificial Sequence
  targeting sequence with TTCN PAM
gguaucuuuuaagcaacacc

SEQ ID NO: 4242 - RNA, 20 nt, Artificial Sequence
  targeting sequence with TTCN PAM
acauuuucagguaucuuuua

SEQ ID NO: 4243 - RNA, 20 nt, Artificial Sequence
  targeting sequence with TTCN PAM
aagucauuuccacauuuuca

SEQ ID NO: 4244 - RNA, 20 nt, Artificial Sequence
  targeting sequence with TTCN PAM
gccuguuacccaauuucaaa

SEQ ID NO: 4245 - RNA, 20 nt, Artificial Sequence
  targeting sequence with TTCN PAM
aaauucugccuguuacccaa

SEQ ID NO: 4246 - RNA, 20 nt, Artificial Sequence
  targeting sequence with TTCN PAM
gagcccuccaaacuguucca

SEQ ID NO: 4247 - RNA, 20 nt, Artificial Sequence
  targeting sequence with TTCN PAM
ucugagcccuccaaacuguu

SEQ ID NO: 4248 - RNA, 20 nt, Artificial Sequence
  targeting sequence with TTCN PAM
ugucuucuucugagcccucc

SEQ ID NO: 4249 - RNA, 20 nt, Artificial Sequence
  targeting sequence with TTCN PAM
cacauuuuccugucuucuuc

SEQ ID NO: 4250 - RNA, 20 nt, Artificial Sequence
  targeting sequence with TTCN PAM
aaacuuucucacauuuuccu

SEQ ID NO: 4251 - RNA, 20 nt, Artificial Sequence
  targeting sequence with TTCN PAM
uagagacuuguucaauggcu

SEQ ID NO: 4252 - RNA, 20 nt, Artificial Sequence
  targeting sequence with TTCN PAM
auggcuuugacaaaaauacu

SEQ ID NO: 4253 - RNA, 20 nt, Artificial Sequence
  targeting sequence with TTCN PAM
uaucacuaugaguauuuuug

SEQ ID NO: 4254 - RNA, 20 nt, Artificial Sequence
  targeting sequence with TTCN PAM
ucaucugcccccucugagac

SEQ ID NO: 4255 - RNA, 20 nt, Artificial Sequence
  targeting sequence with TTCN PAM
caacaaguuccucaucugcc

SEQ ID NO: 4256 - RNA, 20 nt, Artificial Sequence
  targeting sequence with TTCN PAM
gcaaaucucaagggcagggg

SEQ ID NO: 4257 - RNA, 20 nt, Artificial Sequence
  targeting sequence with TTCN PAM
acguuccgcaaaucucaagg

SEQ ID NO: 4258 - RNA, 20 nt, Artificial Sequence
  targeting sequence with TTCN PAM
accagauacccuaaaucguc

SEQ ID NO: 4259 - RNA, 20 nt, Artificial Sequence
  targeting sequence with TTCN PAM
uccaccagauacccuaaauc

SEQ ID NO: 4260 - RNA, 20 nt, Artificial Sequence
  targeting sequence with TTCN PAM
aagcagcaaagcauucaaga

SEQ ID NO: 4261 - RNA, 20 nt, Artificial Sequence
  targeting sequence with TTCN PAM
agaggugacuuggguacugu

SEQ ID NO: 4262 - RNA, 20 nt, Artificial Sequence
  targeting sequence with TTCN PAM
guuuugaacgggaagcagag

SEQ ID NO: 4263 - RNA, 20 nt, Artificial Sequence
  targeting sequence with TTCN PAM
aaacagaauguuuuuaacag

SEQ ID NO: 4264 - RNA, 20 nt, Artificial Sequence
  targeting sequence with TTCN PAM
cguucaaaacagaauguuuu

SEQ ID NO: 4265 - RNA, 20 nt, Artificial Sequence
  targeting sequence with TTCN PAM
gaaaauuugcagccuaauau

SEQ ID NO: 4266 - RNA, 20 nt, Artificial Sequence
  targeting sequence with TTCN PAM
gaacuuuugugcucugcuuc

SEQ ID NO: 4267 - RNA, 20 nt, Artificial Sequence
  targeting sequence with TTCN PAM
acugcaauauuaggcugcaa

SEQ ID NO: 4268 - RNA, 20 nt, Artificial Sequence
  targeting sequence with TTCN PAM
uuucuacugcaauauuaggc

SEQ ID NO: 4269 - RNA, 20 nt, Artificial Sequence
  targeting sequence with TTCN PAM
ccucaaaaaauggguuuuuc

SEQ ID NO: 4270 - RNA, 20 nt, Artificial Sequence
  targeting sequence with TTCN PAM
agccagcugcagaaauuugc

SEQ ID NO: 4271 - RNA, 20 nt, Artificial Sequence
  targeting sequence with TTCN PAM
gcagcuggcuugaauuucuc

SEQ ID NO: 4272 - RNA, 20 nt, Artificial Sequence
  targeting sequence with TTCN PAM
ccaugguuuugaggauuaac

SEQ ID NO: 4273 - RNA, 20 nt, Artificial Sequence
  targeting sequence with TTCN PAM
caacagcuccucccaucaca

SEQ ID NO: 4274 - RNA, 20 nt, Artificial Sequence
  targeting sequence with TTCN PAM
uccuggggcucuaggccugu

SEQ ID NO: 4275 - RNA, 20 nt, Artificial Sequence
  targeting sequence with TTCN PAM
ugugcugugugcagcccagg

SEQ ID NO: 4276 - RNA, 20 nt, Artificial Sequence
  targeting sequence with TTCN PAM
gccaugccuggagcagcugg

SEQ ID NO: 4277 - RNA, 20 nt, Artificial Sequence
  targeting sequence with TTCN PAM
gagguggaagccccaagacu

SEQ ID NO: 4278 - RNA, 20 nt, Artificial Sequence
  targeting sequence with TTCN PAM
accucugaagccacagccca

SEQ ID NO: 4279 - RNA, 20 nt, Artificial Sequence
  targeting sequence with TTCN PAM
augugguguugagccugcag

SEQ ID NO: 4280 - RNA, 20 nt, Artificial Sequence
  targeting sequence with TTCN PAM
gugcaccugcaggcucaaca

SEQ ID NO: 4281 - RNA, 20 nt, Artificial Sequence
  targeting sequence with TTCN PAM
ugacuucugugcaccugcag

SEQ ID NO: 4282 - RNA, 20 nt, Artificial Sequence
  targeting sequence with TTCN PAM
caaaccucaauucuugacuu

SEQ ID NO: 4283 - RNA, 20 nt, Artificial Sequence
  targeting sequence with TTCN PAM
gaagacguaggaaaugcuug

SEQ ID NO: 4284 - RNA, 20 nt, Artificial Sequence
  targeting sequence with TTCN PAM
gaaaucuagguggagguucc

SEQ ID NO: 4285 - RNA, 20 nt, Artificial Sequence
  targeting sequence with TTCN PAM
uacgucuucugaaaucuagg

SEQ ID NO: 4286 - RNA, 20 nt, Artificial Sequence
  targeting sequence with TTCN PAM
gccuggacauccaagcauuu

SEQ ID NO: 4287 - RNA, 20 nt, Artificial Sequence
  targeting sequence with TTCN PAM
ggguggggugcucauggaga

SEQ ID NO: 4288 - RNA, 20 nt, Artificial Sequence
  targeting sequence with TTCN PAM
ccaugagcaccccacccuga

SEQ ID NO: 4289 - RNA, 20 nt, Artificial Sequence
  targeting sequence with TTCN PAM
gcacuguccuaccagagguu

SEQ ID NO: 4290 - RNA, 20 nt, Artificial Sequence
  targeting sequence with TTCN PAM
cuucugcacuguccuaccag

SEQ ID NO: 4291 - RNA, 20 nt, Artificial Sequence
  targeting sequence with TTCN PAM
gucugggggcugugacccca

SEQ ID NO: 4292 - RNA, 20 nt, Artificial Sequence
  targeting sequence with TTCN PAM
ggggucuggaggacaguggc

SEQ ID NO: 4293 - RNA, 20 nt, Artificial Sequence
  targeting sequence with TTCN PAM
ccuggaaaaucugcagacaa

SEQ ID NO: 4294 - RNA, 20 nt, Artificial Sequence
  targeting sequence with TTCN PAM
aggagaacagugcaaguugu

SEQ ID NO: 4295 - RNA, 20 nt, Artificial Sequence
  targeting sequence with TTCN PAM
ugggcuggcauugauugucu

SEQ ID NO: 4296 - RNA, 20 nt, Artificial Sequence
  targeting sequence with TTCN PAM
cauggucuugggcagcucug

SEQ ID NO: 4297 - RNA, 20 nt, Artificial Sequence
  targeting sequence with TTCN PAM
cccauuuggaauggcuguau

SEQ ID NO: 4298 - RNA, 20 nt, Artificial Sequence
  targeting sequence with TTCN PAM
aaaugggagaaauuggccaa

SEQ ID NO: 4299 - RNA, 20 nt, Artificial Sequence
  targeting sequence with TTCN PAM
agauacaauagggauacagg

SEQ ID NO: 4300 - RNA, 20 nt, Artificial Sequence
  targeting sequence with TTCN PAM
auuuuacaggcucauaggug

SEQ ID NO: 4301 - RNA, 20 nt, Artificial Sequence
  targeting sequence with TTCN PAM
accuaugagccuguaaaauc

SEQ ID NO: 4302 - RNA, 20 nt, Artificial Sequence
  targeting sequence with TTCN PAM
gcauugacccaaaaguccac

SEQ ID NO: 4303 - RNA, 20 nt, Artificial Sequence
  targeting sequence with TTCN PAM
caacagucucucaaaguuuu

SEQ ID NO: 4304 - RNA, 20 nt, Artificial Sequence
  targeting sequence with TTCN PAM
aaaccaaucaugccuuccca

SEQ ID NO: 4305 - RNA, 20 nt, Artificial Sequence
  targeting sequence with TTCN PAM
uguccucacauuucaaaacc

SEQ ID NO: 4306 - RNA, 20 nt, Artificial Sequence
  targeting sequence with TTCN PAM
gccccugaccccuccaaauu

SEQ ID NO: 4307 - RNA, 20 nt, Artificial Sequence
  targeting sequence with TTCN PAM
acucgcagcuugaauugugu

SEQ ID NO: 4308 - RNA, 20 nt, Artificial Sequence
  targeting sequence with TTCN PAM
agcugcgaguugaauggcaa

SEQ ID NO: 4309 - RNA, 20 nt, Artificial Sequence
  targeting sequence with TTCN PAM
gggagacacaauucaagcug

SEQ ID NO: 4310 - RNA, 20 nt, Artificial Sequence
  targeting sequence with TTCN PAM
cacauguugugggagggagc

SEQ ID NO: 4311 - RNA, 20 nt, Artificial Sequence
  targeting sequence with TTCN PAM
auuaccucucccuggcuccc

SEQ ID NO: 4312 - RNA, 20 nt, Artificial Sequence
  targeting sequence with TTCN PAM
caugcuauucucgugauagu

SEQ ID NO: 4313 - RNA, 20 nt, Artificial Sequence
  targeting sequence with TTCN PAM
cgugauagugaauaagucuc

SEQ ID NO: 4314 - RNA, 20 nt, Artificial Sequence
  targeting sequence with TTCN PAM
cuaucacgagaauagcaugg

SEQ ID NO: 4315 - RNA, 20 nt, Artificial Sequence
  targeting sequence with TTCN PAM
gcuuuuguauccuuuuuauu

SEQ ID NO: 4316 - RNA, 20 nt, Artificial Sequence
  targeting sequence with TTCN PAM
cuugcuguugccauguaaga

SEQ ID NO: 4317 - RNA, 20 nt, Artificial Sequence
  targeting sequence with TTCN PAM
uacauggcaacagcaagaga

SEQ ID NO: 4318 - RNA, 20 nt, Artificial Sequence
  targeting sequence with TTCN PAM
ccuccugccgugauucugag

SEQ ID NO: 4319 - RNA, 20 nt, Artificial Sequence
  targeting sequence with TTCN PAM
gaggccugcccagccaugug

SEQ ID NO: 4320 - RNA, 20 nt, Artificial Sequence
  targeting sequence with TTCN PAM
acauggcugggcaggccuca

SEQ ID NO: 4321 - RNA, 20 nt, Artificial Sequence
  targeting sequence with TTCN PAM
ucccagucuuggguaugucu

SEQ ID NO: 4322 - RNA, 20 nt, Artificial Sequence
  targeting sequence with TTCN PAM
cagucuuggguaugucuuua

SEQ ID NO: 4323 - RNA, 20 nt, Artificial Sequence
  targeting sequence with TTCN PAM
ugcugcugauaaagacauac

SEQ ID NO: 4324 - RNA, 20 nt, Artificial Sequence
  targeting sequence with TTCN PAM
uuuucaugcugcugauaaag

SEQ ID NO: 4325 - RNA, 20 nt, Artificial Sequence
  targeting sequence with TTCN PAM
cggagaaaagccagaguccc

SEQ ID NO: 4326 - RNA, 20 nt, Artificial Sequence
  targeting sequence with TTCN PAM
ccgggaagguggagagcuaa

SEQ ID NO: 4327 - RNA, 20 nt, Artificial Sequence
  targeting sequence with TTCN PAM
ggggacucuggcuuuucucc

SEQ ID NO: 4328 - RNA, 20 nt, Artificial Sequence
  targeting sequence with TTCN PAM
uugcaggcuccuucccaucu

SEQ ID NO: 4329 - RNA, 20 nt, Artificial Sequence
  targeting sequence with TTCN PAM
caucucugggcuguuccagu

SEQ ID NO: 4330 - RNA, 20 nt, Artificial Sequence
  targeting sequence with TTCN PAM
agucuggggcagcacuucuc

SEQ ID NO: 4331 - RNA, 20 nt, Artificial Sequence
  targeting sequence with TTCN PAM
ccacuguguccacggcccgu

SEQ ID NO: 4332 - RNA, 20 nt, Artificial Sequence
  targeting sequence with TTCN PAM
uccaguguucucuuugcaca

SEQ ID NO: 4333 - RNA, 20 nt, Artificial Sequence
  targeting sequence with TTCN PAM
cuuugcacaccgcccuguuu

SEQ ID NO: 4334 - RNA, 20 nt, Artificial Sequence
  targeting sequence with TTCN PAM
cuuuuccuuuuccuccaugg

SEQ ID NO: 4335 - RNA, 20 nt, Artificial Sequence
  targeting sequence with TTCN PAM
uuuuccuccauggcacucau

SEQ ID NO: 4336 - RNA, 20 nt, Artificial Sequence
  targeting sequence with TTCN PAM
uccauggcacucaucaccau

SEQ ID NO: 4337 - RNA, 20 nt, Artificial Sequence
  targeting sequence with TTCN PAM
gcccuacuagagggagggcu

SEQ ID NO: 4338 - RNA, 20 nt, Artificial Sequence
  targeting sequence with TTCN PAM
auggaucuuguucacugcca

SEQ ID NO: 4339 - RNA, 20 nt, Artificial Sequence
  targeting sequence with TTCN PAM
cugccauacccagcaucuag

SEQ ID NO: 4340 - RNA, 20 nt, Artificial Sequence
  targeting sequence with TTCN PAM
agaugcuggguauggcagug

SEQ ID NO: 4341 - RNA, 20 nt, Artificial Sequence
  targeting sequence with TTCN PAM
guaauuaacucagucauuaa

SEQ ID NO: 4342 - RNA, 20 nt, Artificial Sequence
  targeting sequence with TTCN PAM
cugcuuauacugaguucacg

SEQ ID NO: 4343 - RNA, 20 nt, Artificial Sequence
  targeting sequence with TTCN PAM
cgacccguggggaagacaga

SEQ ID NO: 4344 - RNA, 20 nt, Artificial Sequence
  targeting sequence with TTCN PAM
ccacgggucgugaacucagu

SEQ ID NO: 4345 - RNA, 20 nt, Artificial Sequence
  targeting sequence with TTCN PAM
auguagccccuacugcacau

SEQ ID NO: 4346 - RNA, 20 nt, Artificial Sequence
  targeting sequence with TTCN PAM
ucccaugugcaguaggggcu

SEQ ID NO: 4347 - RNA, 20 nt, Artificial Sequence
  targeting sequence with TTCN PAM
cauagccccagagggcaagg

SEQ ID NO: 4348 - RNA, 20 nt, Artificial Sequence
  targeting sequence with TTCN PAM
agcuguuucccauagcccca

SEQ ID NO: 4349 - RNA, 20 nt, Artificial Sequence
  targeting sequence with TTCN PAM
ugucuauuaaacagagauga

SEQ ID NO: 4350 - RNA, 20 nt, Artificial Sequence
  targeting sequence with TTCN PAM
ccccagcccugugggacaug

SEQ ID NO: 4351 - RNA, 20 nt, Artificial Sequence
  targeting sequence with TTCN PAM
ugucucauucgccccagccc

SEQ ID NO: 4352 - RNA, 20 nt, Artificial Sequence
  targeting sequence with TTCN PAM
uccuuccugucucauucgcc

SEQ ID NO: 4353 - RNA, 20 nt, Artificial Sequence
  targeting sequence with TTCN PAM
aagugcuccaagagaggagc

SEQ ID NO: 4354 - RNA, 20 nt, Artificial Sequence
  targeting sequence with TTCN PAM
gagguggagucucacucugu

SEQ ID NO: 4355 - RNA, 20 nt, Artificial Sequence
  targeting sequence with TTCN PAM
gcugggcaacagagugagac

SEQ ID NO: 4356 - RNA, 20 nt, Artificial Sequence
  targeting sequence with TTCN PAM
agcaauuccccugccccagc

SEQ ID NO: 4357 - RNA, 20 nt, Artificial Sequence
  targeting sequence with TTCN PAM
ccugccccagccucccuagu

SEQ ID NO: 4358 - RNA, 20 nt, Artificial Sequence
  targeting sequence with TTCN PAM
agaccagccuggccaacaug

SEQ ID NO: 4359 - RNA, 20 nt, Artificial Sequence
  targeting sequence with TTCN PAM
acaguuauaucauguuuaaa

SEQ ID NO: 4360 - RNA, 20 nt, Artificial Sequence
  targeting sequence with TTCN PAM
auuuggggucuguaccuuaa

SEQ ID NO: 4361 - RNA, 20 nt, Artificial Sequence
  targeting sequence with TTCN PAM
auaaagugguuacauuugua

SEQ ID NO: 4362 - RNA, 20 nt, Artificial Sequence
  targeting sequence with TTCN PAM
augucaauauauaaaccucc

SEQ ID NO: 4363 - RNA, 20 nt, Artificial Sequence
  targeting sequence with TTCN PAM
uuuuaccagcugccaaauau

SEQ ID NO: 4364 - RNA, 20 nt, Artificial Sequence
  targeting sequence with TTCN PAM
uauggugggauauuuggcag

SEQ ID NO: 4365 - RNA, 20 nt, Artificial Sequence
  targeting sequence with TTCN PAM
ucaauggagggacagauuuu

SEQ ID NO: 4366 - RNA, 20 nt, Artificial Sequence
  targeting sequence with TTCN PAM
gcaauccaaacauucaucaa

SEQ ID NO: 4367 - RNA, 20 nt, Artificial Sequence
  targeting sequence with TTCN PAM
agggguucagcaauccaaac

SEQ ID NO: 4368 - RNA, 20 nt, Artificial Sequence
  targeting sequence with TTCN PAM
uccagggguucagcaaucca

SEQ ID NO: 4369 - RNA, 20 nt, Artificial Sequence
  targeting sequence with TTCN PAM
auaagagcaaacagaagugu

SEQ ID NO: 4370 - RNA, 20 nt, Artificial Sequence
  targeting sequence with TTCN PAM
guuugcucuuauugaauuuc

SEQ ID NO: 4371 - RNA, 20 nt, Artificial Sequence
  targeting sequence with TTCN PAM
cuuagcucuccccgcuccac

SEQ ID NO: 4372 - RNA, 20 nt, Artificial Sequence
  targeting sequence with TTCN PAM
ggcugcgcugccuccugccu

SEQ ID NO: 4373 - RNA, 20 nt, Artificial Sequence
  targeting sequence with TTCN PAM
caccccaccacaugucuggg

SEQ ID NO: 4374 - RNA, 20 nt, Artificial Sequence
  targeting sequence with TTCN PAM
uauacccuguucagucuuua

SEQ ID NO: 4375 - RNA, 20 nt, Artificial Sequence
  targeting sequence with TTCN PAM
gucuuuacugagucagaagc

SEQ ID NO: 4376 - RNA, 20 nt, Artificial Sequence
  targeting sequence with TTCN PAM
gacucaguaaagacugaaca

SEQ ID NO: 4377 - RNA, 20 nt, Artificial Sequence
  targeting sequence with TTCN PAM
uacggaaaagcgugcugcug

SEQ ID NO: 4378 - RNA, 20 nt, Artificial Sequence
  targeting sequence with TTCN PAM
guaagaagcucugcuguaaa

SEQ ID NO: 4379 - RNA, 20 nt, Artificial Sequence
  targeting sequence with TTCN PAM
aggaugaggcuggagcuggc

SEQ ID NO: 4380 - RNA, 20 nt, Artificial Sequence
  targeting sequence with TTCN PAM
auaucauuaguaccucuuug

SEQ ID NO: 4381 - RNA, 20 nt, Artificial Sequence
  targeting sequence with TTCN PAM
uuaggauaaauuccuaagaa

SEQ ID NO: 4382 - RNA, 20 nt, Artificial Sequence
  targeting sequence with TTCN PAM
uaagaaaucaaauagcuagg

SEQ ID NO: 4383 - RNA, 20 nt, Artificial Sequence
  targeting sequence with TTCN PAM
uaggaauuuauccuaaggaa

SEQ ID NO: 4384 - RNA, 20 nt, Artificial Sequence
  targeting sequence with TTCN PAM
caguuugcuacugacuagag

SEQ ID NO: 4385 - RNA, 20 nt, Artificial Sequence
  targeting sequence with TTCN PAM
ggcuguuuuuguaccuuuaa

SEQ ID NO: 4386 - RNA, 20 nt, Artificial Sequence
  targeting sequence with TTCN PAM
aaucagggagaaaaaaugag

SEQ ID NO: 4387 - RNA, 20 nt, Artificial Sequence
  targeting sequence with TTCN PAM
cccugauuagaaaugacguc

SEQ ID NO: 4388 - RNA, 20 nt, Artificial Sequence
  targeting sequence with TTCN PAM
guaacucauuuuuucucccu

SEQ ID NO: 4389 - RNA, 20 nt, Artificial Sequence
  targeting sequence with TTCN PAM
aauaccguuuauuccguaac

SEQ ID NO: 4390 - RNA, 20 nt, Artificial Sequence
  targeting sequence with TTCN PAM
ggagaaaaauaaccucacuc

SEQ ID NO: 4391 - RNA, 20 nt, Artificial Sequence
  targeting sequence with TTCN PAM
ccagaaggcuagccuauugu

SEQ ID NO: 4392 - RNA, 20 nt, Artificial Sequence
  targeting sequence with TTCN PAM
acugggauuuacuuuuguau

SEQ ID NO: 4393 - RNA, 20 nt, Artificial Sequence
  targeting sequence with TTCN PAM
aagcacaguacaaaaucaag

SEQ ID NO: 4394 - RNA, 20 nt, Artificial Sequence
  targeting sequence with TTCN PAM
ugauuuuguacugugcuuag

SEQ ID NO: 4395 - RNA, 20 nt, Artificial Sequence
  targeting sequence with TTCN PAM
ugacuucuugauuuuguacu

SEQ ID NO: 4396 - RNA, 20 nt, Artificial Sequence
  targeting sequence with TTCN PAM
uggagucaaacuuaucagcc

SEQ ID NO: 4397 - RNA, 20 nt, Artificial Sequence
  targeting sequence with TTCN PAM
auggaaaaaaauacaauaaa

SEQ ID NO: 4398 - RNA, 20 nt, Artificial Sequence
  targeting sequence with TTCN PAM
auagaaaauuuuaauuuuca

SEQ ID NO: 4399 - RNA, 20 nt, Artificial Sequence
  targeting sequence with TTCN PAM
aguuuguugauugauuuuug

SEQ ID NO: 4400 - RNA, 20 nt, Artificial Sequence
  targeting sequence with TTCN PAM
uuuuggcuguggagcuuuug

SEQ ID NO: 4401 - RNA, 20 nt, Artificial Sequence
  targeting sequence with TTCN PAM
uuuuuucauuuuggcugugg

SEQ ID NO: 4402 - RNA, 20 nt, Artificial Sequence
  targeting sequence with TTCN PAM
aagacaaacaaauguagaua

SEQ ID NO: 4403 - RNA, 20 nt, Artificial Sequence
  targeting sequence with TTCN PAM
uuaaguuaaacaauuaucua

SEQ ID NO: 4404 - RNA, 20 nt, Artificial Sequence
  targeting sequence with TTCN PAM
caaauauacccuuucuccuc

SEQ ID NO: 4405 - RNA, 20 nt, Artificial Sequence
  targeting sequence with TTCN PAM
ccuccuucugggcacuuggu

SEQ ID NO: 4406 - RNA, 20 nt, Artificial Sequence
  targeting sequence with TTCN PAM
gggcacuuggugugauugca

SEQ ID NO: 4407 - RNA, 20 nt, Artificial Sequence
  targeting sequence with TTCN PAM
uacauuugaccuuaggugug

SEQ ID NO: 4408 - RNA, 20 nt, Artificial Sequence
  targeting sequence with TTCN PAM
ccuaagcgagacacaugacc

SEQ ID NO: 4409 - RNA, 20 nt, Artificial Sequence
  targeting sequence with TTCN PAM
uucuccuaagcgagacacau

SEQ ID NO: 4410 - RNA, 20 nt, Artificial Sequence
  targeting sequence with TTCN PAM
cauuuccuucuccuaagcga

SEQ ID NO: 4411 - RNA, 20 nt, Artificial Sequence
  targeting sequence with TTCN PAM
guucacauuuccuucuccua

SEQ ID NO: 4412 - RNA, 20 nt, Artificial Sequence
  targeting sequence with TTCN PAM
acacaaaagugacccacaac

SEQ ID NO: 4413 - RNA, 20 nt, Artificial Sequence
  targeting sequence with TTCN PAM
gucagccucaguguucagca

SEQ ID NO: 4414 - RNA, 20 nt, Artificial Sequence
  targeting sequence with TTCN PAM
gcaauguucugaaugauggu

SEQ ID NO: 4415 - RNA, 20 nt, Artificial Sequence
  targeting sequence with TTCN PAM
gaaugaugguugcuuuauca

SEQ ID NO: 4416 - RNA, 20 nt, Artificial Sequence
  targeting sequence with TTCN PAM
gaacauugcugaacacugag

SEQ ID NO: 4417 - RNA, 20 nt, Artificial Sequence
  targeting sequence with TTCN PAM
ggggugaggguaaugaagua

SEQ ID NO: 4418 - RNA, 20 nt, Artificial Sequence
  targeting sequence with TTCN PAM
uuacccucaccccagaacca

SEQ ID NO: 4419 - RNA, 20 nt, Artificial Sequence
  targeting sequence with TTCN PAM
cuacuucauuacccucaccc

SEQ ID NO: 4420 - RNA, 20 nt, Artificial Sequence
  targeting sequence with TTCN PAM
gucucaccucacauguccau

SEQ ID NO: 4421 - RNA, 20 nt, Artificial Sequence
  targeting sequence with TTCN PAM
agccccugagauuuggggcg

SEQ ID NO: 4422 - RNA, 20 nt, Artificial Sequence
  targeting sequence with TTCN PAM
agcacaugcacgccccaaau

SEQ ID NO: 4423 - RNA, 20 nt, Artificial Sequence
  targeting sequence with TTCN PAM
gcuuccagcacaugcacgcc

SEQ ID NO: 4424 - RNA, 20 nt, Artificial Sequence
  targeting sequence with TTCN PAM
gauggauuccuccagcacug

SEQ ID NO: 4425 - RNA, 20 nt, Artificial Sequence
  targeting sequence with TTCN PAM
uccagcacugcucgugggaa

SEQ ID NO: 4426 - RNA, 20 nt, Artificial Sequence
  targeting sequence with TTCN PAM
cacgagcagugcuggaggaa

SEQ ID NO: 4427 - RNA, 20 nt, Artificial Sequence
  targeting sequence with TTCN PAM
ugugcccuuuaucucgaaau

SEQ ID NO: 4428 - RNA, 20 nt, Artificial Sequence
  targeting sequence with TTCN PAM
agauaaagggcacaugaaug

SEQ ID NO: 4429 - RNA, 20 nt, Artificial Sequence
  targeting sequence with TTCN PAM
acuuccaggaauuuaugaaa

SEQ ID NO: 4430 - RNA, 20 nt, Artificial Sequence
  targeting sequence with TTCN PAM
aggaauuuaugaaacagaua

SEQ ID NO: 4431 - RNA, 20 nt, Artificial Sequence
  targeting sequence with TTCN PAM
uggaaguggaauuucgagau

SEQ ID NO: 4432 - RNA, 20 nt, Artificial Sequence
  targeting sequence with TTCN PAM
uaaauuccuggaaguggaau

SEQ ID NO: 4433 - RNA, 20 nt, Artificial Sequence
  targeting sequence with TTCN PAM
gucuuuugcuauugcaaucc

SEQ ID NO: 4434 - RNA, 20 nt, Artificial Sequence
  targeting sequence with TTCN PAM
guugguuguuucugucuuuu

SEQ ID NO: 4435 - RNA, 20 nt, Artificial Sequence
  targeting sequence with TTCN PAM
uauugguugguguuuccguu

SEQ ID NO: 4436 - RNA, 20 nt, Artificial Sequence
  targeting sequence with TTCN PAM
caaugucuuuagccaauuuc

SEQ ID NO: 4437 - RNA, 20 nt, Artificial Sequence
  targeting sequence with TTCN PAM
auguauguuucacaaugucu

SEQ ID NO: 4438 - RNA, 20 nt, Artificial Sequence
  targeting sequence with TTCN PAM
uucuauguauguuucacaau

SEQ ID NO: 4439 - RNA, 20 nt, Artificial Sequence
  targeting sequence with TTCN PAM
gguugcagauuauuucauuc

SEQ ID NO: 4440 - RNA, 20 nt, Artificial Sequence
  targeting sequence with TTCN PAM
gagauuagggcuagguuaag

SEQ ID NO: 4441 - RNA, 20 nt, Artificial Sequence
  targeting sequence with TTCN PAM
gagauagucuacuuuuauaa

SEQ ID NO: 4442 - RNA, 20 nt, Artificial Sequence
  targeting sequence with TTCN PAM
uggggcuguuauaacaaguu

SEQ ID NO: 4443 - RNA, 20 nt, Artificial Sequence
  targeting sequence with TTCN PAM
acaaauuugcuggcuucaaa

SEQ ID NO: 4444 - RNA, 20 nt, Artificial Sequence
  targeting sequence with TTCN PAM
aauaacaaaaacguauucuc

SEQ ID NO: 4445 - RNA, 20 nt, Artificial Sequence
  targeting sequence with TTCN PAM
cuugcaguuauggaagccag

SEQ ID NO: 4446 - RNA, 20 nt, Artificial Sequence
  targeting sequence with TTCN PAM
auaacugcaagagaauacgu

SEQ ID NO: 4447 - RNA, 20 nt, Artificial Sequence
  targeting sequence with TTCN PAM
ggcuuccauaacugcaagag

SEQ ID NO: 4448 - RNA, 20 nt, Artificial Sequence
  targeting sequence with TTCN PAM
auacuucuggcuuccauaac

SEQ ID NO: 4449 - RNA, 20 nt, Artificial Sequence
  targeting sequence with TTCN PAM
uuccauacuucuggcuucca

SEQ ID NO: 4450 - RNA, 20 nt, Artificial Sequence
  targeting sequence with TTCN PAM
uccccuagagcuuugggaga

SEQ ID NO: 4451 - RNA, 20 nt, Artificial Sequence
  targeting sequence with TTCN PAM
uugcuucuuccagcuccuuu

SEQ ID NO: 4452 - RNA, 20 nt, Artificial Sequence
  targeting sequence with TTCN PAM
uccagcuccuuugggggcuc

SEQ ID NO: 4453 - RNA, 20 nt, Artificial Sequence
  targeting sequence with TTCN PAM
agcuccuuugggggcuccug

SEQ ID NO: 4454 - RNA, 20 nt, Artificial Sequence
  targeting sequence with TTCN PAM
uuggcuuaugucggcacagc

SEQ ID NO: 4455 - RNA, 20 nt, Artificial Sequence
  targeting sequence with TTCN PAM
gugucucaaguaucucuccc

SEQ ID NO: 4456 - RNA, 20 nt, Artificial Sequence
  targeting sequence with TTCN PAM
cuucugauaucagucauugg

SEQ ID NO: 4457 - RNA, 20 nt, Artificial Sequence
  targeting sequence with TTCN PAM
gauaucagucauuggauuua

SEQ ID NO: 4458 - RNA, 20 nt, Artificial Sequence
  targeting sequence with TTCN PAM
aaauaaggucacauucaaaa

SEQ ID NO: 4459 - RNA, 20 nt, Artificial Sequence
  targeting sequence with TTCN PAM
aaaguaccagggguuagucu

SEQ ID NO: 4460 - RNA, 20 nt, Artificial Sequence
  targeting sequence with TTCN PAM
acccacuaccguggguaaca

SEQ ID NO: 4461 - RNA, 20 nt, Artificial Sequence
  targeting sequence with TTCN PAM
cucagaagguggugguucag

SEQ ID NO: 4462 - RNA, 20 nt, Artificial Sequence
  targeting sequence with TTCN PAM
gagggaaaaccacuguuacc

SEQ ID NO: 4463 - RNA, 20 nt, Artificial Sequence
  targeting sequence with TTCN PAM
ggagugggaggaagaugaac

SEQ ID NO: 4464 - RNA, 20 nt, Artificial Sequence
  targeting sequence with TTCN PAM
ucccacuccugaaccaccac

SEQ ID NO: 4465 - RNA, 20 nt, Artificial Sequence
  targeting sequence with TTCN PAM
ucuuccucccacuccugaac

SEQ ID NO: 4466 - RNA, 20 nt, Artificial Sequence
  targeting sequence with TTCN PAM
cuguauauccuuucaaacua

SEQ ID NO: 4467 - RNA, 20 nt, Artificial Sequence
  targeting sequence with TTCN PAM
aacuauucacguuuuaaaaa

SEQ ID NO: 4468 - RNA, 20 nt, Artificial Sequence
  targeting sequence with TTCN PAM
cguuuuaaaaaaaacauuuu

SEQ ID NO: 4469 - RNA, 20 nt, Artificial Sequence
  targeting sequence with TTCN PAM
uguaaauuuaaaaaaauuga

SEQ ID NO: 4470 - RNA, 20 nt, Artificial Sequence
  targeting sequence with TTCN PAM
auuuuuuuaaauuuacauga

SEQ ID NO: 4471 - RNA, 20 nt, Artificial Sequence
  targeting sequence with TTCN PAM
cacaaaaagaugcccccucc

SEQ ID NO: 4472 - RNA, 20 nt, Artificial Sequence
  targeting sequence with TTCN PAM
aaauguugaaauguacacuc

SEQ ID NO: 4473 - RNA, 20 nt, Artificial Sequence
  targeting sequence with TTCN PAM
acauuuugaacgggcauacu

SEQ ID NO: 4474 - RNA, 20 nt, Artificial Sequence
  targeting sequence with TTCN PAM
gagguuggagaagguagcca

SEQ ID NO: 4475 - RNA, 20 nt, Artificial Sequence
  targeting sequence with TTCN PAM
ccaaccucagaaacuuggag

SEQ ID NO: 4476 - RNA, 20 nt, Artificial Sequence
  targeting sequence with TTCN PAM
aucuacucauucagucuaug

SEQ ID NO: 4477 - RNA, 20 nt, Artificial Sequence
  targeting sequence with TTCN PAM
gucuaugaggggaaggcaau

SEQ ID NO: 4478 - RNA, 20 nt, Artificial Sequence
  targeting sequence with TTCN PAM
ccucauagacugaaugagua

SEQ ID NO: 4479 - RNA, 20 nt, Artificial Sequence
  targeting sequence with TTCN PAM
agccauugccuuccccucau

SEQ ID NO: 4480 - RNA, 20 nt, Artificial Sequence
  targeting sequence with TTCN PAM
ucccucuaaaaaugccacuu

SEQ ID NO: 4481 - RNA, 20 nt, Artificial Sequence
  targeting sequence with TTCN PAM
ccccacaagcauccucaagg

SEQ ID NO: 4482 - RNA, 20 nt, Artificial Sequence
  targeting sequence with TTCN PAM
cuucaccccacaagcauccu

SEQ ID NO: 4483 - RNA, 20 nt, Artificial Sequence
  targeting sequence with TTCN PAM
uucccuucaccccacaagca

SEQ ID NO: 4484 - RNA, 20 nt, Artificial Sequence
  targeting sequence with TTCN PAM
ugaguuauucuuucccuuca

SEQ ID NO: 4485 - RNA, 20 nt, Artificial Sequence
  targeting sequence with TTCN PAM
gggcagaggggaccauccuc

SEQ ID NO: 4486 - RNA, 20 nt, Artificial Sequence
  targeting sequence with TTCN PAM
uccuucagggcagaggggac

SEQ ID NO: 4487 - RNA, 20 nt, Artificial Sequence
  targeting sequence with TTCN PAM
ccuccugccuuccuccuuca

SEQ ID NO: 4488 - RNA, 20 nt, Artificial Sequence
  targeting sequence with TTCN PAM
gggucaacacccauccuuuu

SEQ ID NO: 4489 - RNA, 20 nt, Artificial Sequence
  targeting sequence with TTCN PAM
ggggccuccccuccaccaca

SEQ ID NO: 4490 - RNA, 20 nt, Artificial Sequence
  targeting sequence with TTCN PAM
gacuuacccugauugcuggu

SEQ ID NO: 4491 - RNA, 20 nt, Artificial Sequence
  targeting sequence with TTCN PAM
cccacacccuggccagcaaa

SEQ ID NO: 4492 - RNA, 20 nt, Artificial Sequence
  targeting sequence with TTCN PAM
caaauggguucccccacacc

SEQ ID NO: 4493 - RNA, 20 nt, Artificial Sequence
  targeting sequence with TTCN PAM
cccucuucucaaauggguuc

SEQ ID NO: 4494 - RNA, 20 nt, Artificial Sequence
  targeting sequence with TTCN PAM
uuugggcaacuuaugggagg

SEQ ID NO: 4495 - RNA, 20 nt, Artificial Sequence
  targeting sequence with TTCN PAM
ucccucaccaauuaccccuc

SEQ ID NO: 4496 - RNA, 20 nt, Artificial Sequence
  targeting sequence with TTCN PAM
caucccauauccuccacugc

SEQ ID NO: 4497 - RNA, 20 nt, Artificial Sequence
  targeting sequence with TTCN PAM
aucugucgcagagcccaggg

SEQ ID NO: 4498 - RNA, 20 nt, Artificial Sequence
  targeting sequence with TTCN PAM
uuccucccccaccucccuca

SEQ ID NO: 4499 - RNA, 20 nt, Artificial Sequence
  targeting sequence with TTCN PAM
ucccccaccucccucagaac

SEQ ID NO: 4500 - RNA, 20 nt, Artificial Sequence
  targeting sequence with TTCN PAM
gagggaggugggggaggaag

SEQ ID NO: 4501 - RNA, 20 nt, Artificial Sequence
  targeting sequence with TTCN PAM
ugggccuggggacauccaug

SEQ ID NO: 4502 - RNA, 20 nt, Artificial Sequence
  targeting sequence with TTCN PAM
ucauucucugggugcacggu

SEQ ID NO: 4503 - RNA, 20 nt, Artificial Sequence
  targeting sequence with TTCN PAM
cugggugcacgguaacgacc

SEQ ID NO: 4504 - RNA, 20 nt, Artificial Sequence
  targeting sequence with TTCN PAM
cugcugcuccccuuugggac

SEQ ID NO: 4505 - RNA, 20 nt, Artificial Sequence
  targeting sequence with TTCN PAM
ugcuccaggggaggccuuug

SEQ ID NO: 4506 - RNA, 20 nt, Artificial Sequence
  targeting sequence with TTCN PAM
ucaucaaaggccuccccugg

SEQ ID NO: 4507 - RNA, 20 nt, Artificial Sequence
  targeting sequence with TTCN PAM
aauuacaggcaacaggaagg

SEQ ID NO: 4508 - RNA, 20 nt, Artificial Sequence
  targeting sequence with TTCN PAM
uguugccuguaauuggaauu

SEQ ID NO: 4509 - RNA, 20 nt, Artificial Sequence
  targeting sequence with TTCN PAM
ccuuccuguugccuguaauu

SEQ ID NO: 4510 - RNA, 20 nt, Artificial Sequence
  targeting sequence with TTCN PAM
acuuuguuugcaaagaccuc

SEQ ID NO: 4511 - RNA, 20 nt, Artificial Sequence
  targeting sequence with TTCN PAM
gagcaggccauuucacucgg

SEQ ID NO: 4512 - RNA, 20 nt, Artificial Sequence
  targeting sequence with TTCN PAM
cucggaaucugcugugcauc

SEQ ID NO: 4513 - RNA, 20 nt, Artificial Sequence
  targeting sequence with TTCN PAM
gagugaaauggccugcucug

SEQ ID NO: 4514 - RNA, 20 nt, Artificial Sequence
  targeting sequence with TTCN PAM
ccuuuguuucuucccaguau

SEQ ID NO: 4515 - RNA, 20 nt, Artificial Sequence
  targeting sequence with TTCN PAM
ucccaguaucgacagcccuu

SEQ ID NO: 4516 - RNA, 20 nt, Artificial Sequence
  targeting sequence with TTCN PAM
caguaucgacagcccuucca

SEQ ID NO: 4517 - RNA, 20 nt, Artificial Sequence
  targeting sequence with TTCN PAM
agaaagagcaagccucaugu

SEQ ID NO: 4518 - RNA, 20 nt, Artificial Sequence
  targeting sequence with TTCN PAM
ggaagggcugucgauacugg

SEQ ID NO: 4519 - RNA, 20 nt, Artificial Sequence
  targeting sequence with TTCN PAM
ccuuuucauccuccugccug

SEQ ID NO: 4520 - RNA, 20 nt, Artificial Sequence
  targeting sequence with TTCN PAM
uccuccugccugguacacaa

SEQ ID NO: 4521 - RNA, 20 nt, Artificial Sequence
  targeting sequence with TTCN PAM
ugaacaugguguguaaaagg

SEQ ID NO: 4522 - RNA, 20 nt, Artificial Sequence
  targeting sequence with TTCN PAM
agaaaucaacuggacaagca

SEQ ID NO: 4523 - RNA, 20 nt, Artificial Sequence
  targeting sequence with TTCN PAM
uuuuacacaccauguucaag

SEQ ID NO: 4524 - RNA, 20 nt, Artificial Sequence
  targeting sequence with TTCN PAM
auuugcaaagauuccuuuua

SEQ ID NO: 4525 - RNA, 20 nt, Artificial Sequence
  targeting sequence with TTCN PAM
ggaaagcugagcuugugccu

SEQ ID NO: 4526 - RNA, 20 nt, Artificial Sequence
  targeting sequence with TTCN PAM
agaagauucaauuugcaaag

SEQ ID NO: 4527 - RNA, 20 nt, Artificial Sequence
  targeting sequence with TTCN PAM
augguaggcacaagcucagc

SEQ ID NO: 4528 - RNA, 20 nt, Artificial Sequence
  targeting sequence with TTCN PAM
gaauguaccuauaugacguc

SEQ ID NO: 4529 - RNA, 20 nt, Artificial Sequence
  targeting sequence with TTCN PAM
gaauucuaugguaggcacaa

SEQ ID NO: 4530 - RNA, 20 nt, Artificial Sequence
  targeting sequence with TTCN PAM
gguuuuaaguuugcaaagac

SEQ ID NO: 4531 - RNA, 20 nt, Artificial Sequence
  targeting sequence with TTCN PAM
agggauuuauacuacaaaga

SEQ ID NO: 4532 - RNA, 20 nt, Artificial Sequence
  targeting sequence with TTCN PAM
aggagcagcuaguugguaag

SEQ ID NO: 4533 - RNA, 20 nt, Artificial Sequence
  targeting sequence with TTCN PAM
aaacuuagccuggacccccu

SEQ ID NO: 4534 - RNA, 20 nt, Artificial Sequence
  targeting sequence with TTCN PAM
acuggccuuaaccuggcagc

SEQ ID NO: 4535 - RNA, 20 nt, Artificial Sequence
  targeting sequence with TTCN PAM
uuccacuggccuuaaccugg

SEQ ID NO: 4536 - RNA, 20 nt, Artificial Sequence
  targeting sequence with TTCN PAM
gugggcagcgaggaguccac

SEQ ID NO: 4537 - RNA, 20 nt, Artificial Sequence
  targeting sequence with TTCN PAM
gaagucucacuggucagcag

SEQ ID NO: 4538 - RNA, 20 nt, Artificial Sequence
  targeting sequence with TTCN PAM
gaaucaauccuacuguggac

SEQ ID NO: 4539 - RNA, 20 nt, Artificial Sequence
  targeting sequence with TTCN PAM
uggguccaccuugucuccug

SEQ ID NO: 4540 - RNA, 20 nt, Artificial Sequence
  targeting sequence with TTCN PAM
guguuuccuggguccaccuu

SEQ ID NO: 4541 - RNA, 20 nt, Artificial Sequence
  targeting sequence with TTCN PAM
gccgggcccaccuuuucagu

SEQ ID NO: 4542 - RNA, 20 nt, Artificial Sequence
  targeting sequence with TTCN PAM
agcccaguuaggauuuggga

SEQ ID NO: 4543 - RNA, 20 nt, Artificial Sequence
  targeting sequence with TTCN PAM
ucccucugcgcguaaucuga

SEQ ID NO: 4544 - RNA, 20 nt, Artificial Sequence
  targeting sequence with TTCN PAM
cucugcgcguaaucugacgc

SEQ ID NO: 4545 - RNA, 20 nt, Artificial Sequence
  targeting sequence with TTCN PAM
gccucgcccuccccaaacag

SEQ ID NO: 4546 - RNA, 20 nt, Artificial Sequence
  targeting sequence with TTCN PAM
guuaauguuuaaucagauag

SEQ ID NO: 4547 - RNA, 20 nt, Artificial Sequence
  targeting sequence with TTCN PAM
agggugugggugcuugacgc

SEQ ID NO: 4548 - RNA, 20 nt, Artificial Sequence
  targeting sequence with TTCN PAM
gcagcgacgucgaggcgcuc

SEQ ID NO: 4549 - RNA, 20 nt, Artificial Sequence
  targeting sequence with TTCN PAM
guucagggucugagccugga

SEQ ID NO: 4550 - RNA, 20 nt, Artificial Sequence
  targeting sequence with TTCN PAM
gggucugagccuggaggagu

SEQ ID NO: 4551 - RNA, 20 nt, Artificial Sequence
  targeting sequence with TTCN PAM
gcgcgccccuucacgcgccc

SEQ ID NO: 4552 - RNA, 20 nt, Artificial Sequence
  targeting sequence with TTCN PAM
cgcgcccugcuccugaacuu

SEQ ID NO: 4553 - RNA, 20 nt, Artificial Sequence
  targeting sequence with TTCN PAM
ggagcagggcgcgugaaggg

SEQ ID NO: 4554 - RNA, 20 nt, Artificial Sequence
  targeting sequence with TTCN PAM
gcuccugcacaguccucccc

SEQ ID NO: 4555 - RNA, 20 nt, Artificial Sequence
  targeting sequence with TTCN PAM
gaggaggacggccuggccga

SEQ ID NO: 4556 - RNA, 20 nt, Artificial Sequence
  targeting sequence with TTCN PAM
gccaggccguccuccucgga

SEQ ID NO: 4557 - RNA, 20 nt, Artificial Sequence
  targeting sequence with TTCN PAM
gugcucgggugcuucggcca

SEQ ID NO: 4558 - RNA, 20 nt, Artificial Sequence
  targeting sequence with TTCN PAM
accgcugcgccaaggugcgg

SEQ ID NO: 4559 - RNA, 20 nt, Artificial Sequence
  targeting sequence with TTCN PAM
ccccggccucccaucccuac

SEQ ID NO: 4560 - RNA, 20 nt, Artificial Sequence
  targeting sequence with TTCN PAM
ucucgggccucaguuucccc

SEQ ID NO: 4561 - RNA, 20 nt, Artificial Sequence
  targeting sequence with TTCN PAM
ccccauguaagagaggaagu

SEQ ID NO: 4562 - RNA, 20 nt, Artificial Sequence
  targeting sequence with TTCN PAM
ucucuuacauggggggaaac

SEQ ID NO: 4563 - RNA, 20 nt, Artificial Sequence
  targeting sequence with TTCN PAM
cuuggcacgaucuuggggac

SEQ ID NO: 4564 - RNA, 20 nt, Artificial Sequence
  targeting sequence with TTCN PAM
gugggaagguucgcgggguu

SEQ ID NO: 4565 - RNA, 20 nt, Artificial Sequence
  targeting sequence with TTCN PAM
cacugaauagcgcagccgca

SEQ ID NO: 4566 - RNA, 20 nt, Artificial Sequence
  targeting sequence with TTCN PAM
cgggguugggagacccggag

SEQ ID NO: 4567 - RNA, 20 nt, Artificial Sequence
  targeting sequence with TTCN PAM
ucggccuccgggucucccaa

SEQ ID NO: 4568 - RNA, 20 nt, Artificial Sequence
  targeting sequence with TTCN PAM
caguuucugccucgccgcgg

SEQ ID NO: 4569 - RNA, 20 nt, Artificial Sequence
  targeting sequence with TTCN PAM
gccucgccgcggcacaggug

SEQ ID NO: 4570 - RNA, 20 nt, Artificial Sequence
  targeting sequence with TTCN PAM
cccaccugugccgcggcgag

SEQ ID NO: 4571 - RNA, 20 nt, Artificial Sequence
  targeting sequence with TTCN PAM
cuccuucacccaccugugcc

SEQ ID NO: 4572 - RNA, 20 nt, Artificial Sequence
  targeting sequence with TTCN PAM
aggcauucacuccuucaccc

SEQ ID NO: 4573 - RNA, 20 nt, Artificial Sequence
  targeting sequence with TTCN PAM
caguacguuccaggcauuca

SEQ ID NO: 4574 - RNA, 20 nt, Artificial Sequence
  targeting sequence with TTCN PAM
cugugccuggugcaguuccc

SEQ ID NO: 4575 - RNA, 20 nt, Artificial Sequence
  targeting sequence with TTCN PAM
gauuugguuuggaaaacaug

SEQ ID NO: 4576 - RNA, 20 nt, Artificial Sequence
  targeting sequence with TTCN PAM
aaaccaaaucggaacccacu

SEQ ID NO: 4577 - RNA, 20 nt, Artificial Sequence
  targeting sequence with TTCN PAM
cuccaggcccuccacccucc

SEQ ID NO: 4578 - RNA, 20 nt, Artificial Sequence
  targeting sequence with TTCN PAM
caccccgccccugucucggg

SEQ ID NO: 4579 - RNA, 20 nt, Artificial Sequence
  targeting sequence with TTCN PAM
uuaugacacagaacucaugc

SEQ ID NO: 4580 - RNA, 20 nt, Artificial Sequence
  targeting sequence with TTCN PAM
gugucauaaagaaauugccu

SEQ ID NO: 4581 - RNA, 20 nt, Artificial Sequence
  targeting sequence with TTCN PAM
aucuguuucagccgaagaaa

SEQ ID NO: 4582 - RNA, 20 nt, Artificial Sequence
  targeting sequence with TTCN PAM
gccgaagaaaagaaccagcu

SEQ ID NO: 4583 - RNA, 20 nt, Artificial Sequence
  targeting sequence with TTCN PAM
gcugaaacagauggaauacu

SEQ ID NO: 4584 - RNA, 20 nt, Artificial Sequence
  targeting sequence with TTCN PAM
ucggcugaaacagauggaau

SEQ ID NO: 4585 - RNA, 20 nt, Artificial Sequence
  targeting sequence with TTCN PAM
uuucuucggcugaaacagau

SEQ ID NO: 4586 - RNA, 20 nt, Artificial Sequence
  targeting sequence with TTCN PAM
gcugguucuuuucuucggcu

SEQ ID NO: 4587 - RNA, 20 nt, Artificial Sequence
  targeting sequence with TTCN PAM
ccccugccccuucagcuggu

SEQ ID NO: 4588 - RNA, 20 nt, Artificial Sequence
  targeting sequence with TTCN PAM
cgaggcccauuggcguccuu

SEQ ID NO: 4589 - RNA, 20 nt, Artificial Sequence
  targeting sequence with TTCN PAM
cugccugaguccuaaaggac

SEQ ID NO: 4590 - RNA, 20 nt, Artificial Sequence
  targeting sequence with TTCN PAM
ggcccucaggcugugggaag

SEQ ID NO: 4591 - RNA, 20 nt, Artificial Sequence
  targeting sequence with TTCN PAM
cacagccugagggccagaag

SEQ ID NO: 4592 - RNA, 20 nt, Artificial Sequence
  targeting sequence with TTCN PAM
ucccggggcgagaccacuag

SEQ ID NO: 4593 - RNA, 20 nt, Artificial Sequence
  targeting sequence with TTCN PAM
cggggcgagaccacuagcuu

SEQ ID NO: 4594 - RNA, 20 nt, Artificial Sequence
  targeting sequence with TTCN PAM
aaguauuaccagcccaggac

SEQ ID NO: 4595 - RNA, 20 nt, Artificial Sequence
  targeting sequence with TTCN PAM
gugucccccagcuuggaguc

SEQ ID NO: 4596 - RNA, 20 nt, Artificial Sequence
  targeting sequence with TTCN PAM
accccacaucugacuccaag

SEQ ID NO: 4597 - RNA, 20 nt, Artificial Sequence
  targeting sequence with TTCN PAM
ucucacuagcuguggugcuu

SEQ ID NO: 4598 - RNA, 20 nt, Artificial Sequence
  targeting sequence with TTCN PAM
ucuccccaucugcugccacu

SEQ ID NO: 4599 - RNA, 20 nt, Artificial Sequence
  targeting sequence with TTCN PAM
cuucaucuccccaucugcug

SEQ ID NO: 4600 - RNA, 20 nt, Artificial Sequence
  targeting sequence with TTCN PAM
guugaccaugagugaacuua

SEQ ID NO: 4601 - RNA, 20 nt, Artificial Sequence
  targeting sequence with TTCN PAM
cucauggucaacagaacuuu

SEQ ID NO: 4602 - RNA, 20 nt, Artificial Sequence
  targeting sequence with TTCN PAM
ccucugccccaggagcugug

SEQ ID NO: 4603 - RNA, 20 nt, Artificial Sequence
  targeting sequence with TTCN PAM
gccacucacagcugccugcc

SEQ ID NO: 4604 - RNA, 20 nt, Artificial Sequence
  targeting sequence with TTCN PAM
gucugagugugcuggguggc

SEQ ID NO: 4605 - RNA, 20 nt, Artificial Sequence
  targeting sequence with TTCN PAM
uuguucccugagccuuugac

SEQ ID NO: 4606 - RNA, 20 nt, Artificial Sequence
  targeting sequence with TTCN PAM
cugagccuuugacuuucucg

SEQ ID NO: 4607 - RNA, 20 nt, Artificial Sequence
  targeting sequence with TTCN PAM
cgagggauguugugggguug

SEQ ID NO: 4608 - RNA, 20 nt, Artificial Sequence
  targeting sequence with TTCN PAM
uauccuggccacaaccccac

SEQ ID NO: 4609 - RNA, 20 nt, Artificial Sequence
  targeting sequence with TTCN PAM
aguuaccacugcuccaaaac

SEQ ID NO: 4610 - RNA, 20 nt, Artificial Sequence
  targeting sequence with TTCN PAM
ggaaauagugaguaccccau

SEQ ID NO: 4611 - RNA, 20 nt, Artificial Sequence
  targeting sequence with TTCN PAM
agaacaguuguuuuggagca

SEQ ID NO: 4612 - RNA, 20 nt, Artificial Sequence
  targeting sequence with TTCN PAM
gguggucauacagccucugc

SEQ ID NO: 4613 - RNA, 20 nt, Artificial Sequence
  targeting sequence with TTCN PAM
ucucugguggaaguuuggaa

SEQ ID NO: 4614 - RNA, 20 nt, Artificial Sequence
  targeting sequence with TTCN PAM
cugguggaaguuuggaacag

SEQ ID NO: 4615 - RNA, 20 nt, Artificial Sequence
  targeting sequence with TTCN PAM
accagagaagaaacauccuc

SEQ ID NO: 4616 - RNA, 20 nt, Artificial Sequence
  targeting sequence with TTCN PAM
aaacuuccaccagagaagaa

SEQ ID NO: 4617 - RNA, 20 nt, Artificial Sequence
  targeting sequence with TTCN PAM
uuuauucauucauucaaugg

SEQ ID NO: 4618 - RNA, 20 nt, Artificial Sequence
  targeting sequence with TTCN PAM
uucauucaaugguuauuuug

SEQ ID NO: 4619 - RNA, 20 nt, Artificial Sequence
  targeting sequence with TTCN PAM
uucaaugguuauuuuguggg

SEQ ID NO: 4620 - RNA, 20 nt, Artificial Sequence
  targeting sequence with TTCN PAM
augguuauuuugugggaauc

SEQ ID NO: 4621 - RNA, 20 nt, Artificial Sequence
  targeting sequence with TTCN PAM
cacaaaauaaccauugaaug

SEQ ID NO: 4622 - RNA, 20 nt, Artificial Sequence
  targeting sequence with TTCN PAM
auucccacaaaauaaccauu

SEQ ID NO: 4623 - RNA, 20 nt, Artificial Sequence
  targeting sequence with TTCN PAM
aaauucgauucccacaaaau

SEQ ID NO: 4624 - RNA, 20 nt, Artificial Sequence
  targeting sequence with TTCN PAM
uucuaaauucgauucccaca

SEQ ID NO: 4625 - RNA, 20 nt, Artificial Sequence
  targeting sequence with TTCN PAM
gcuugccaaaaaauauuuuc

SEQ ID NO: 4626 - RNA, 20 nt, Artificial Sequence
  targeting sequence with TTCN PAM
uuuagucaugagaaacugag

SEQ ID NO: 4627 - RNA, 20 nt, Artificial Sequence
  targeting sequence with TTCN PAM
caugacuaaaagaaaaggau

SEQ ID NO: 4628 - RNA, 20 nt, Artificial Sequence
  targeting sequence with TTCN PAM
aaugcaccuggggugaccuc

SEQ ID NO: 4629 - RNA, 20 nt, Artificial Sequence
  targeting sequence with TTCN PAM
agaacugacacuccacugca

SEQ ID NO: 4630 - RNA, 20 nt, Artificial Sequence
  targeting sequence with TTCN PAM
ggaaacccaguucuaaugca

SEQ ID NO: 4631 - RNA, 20 nt, Artificial Sequence
  targeting sequence with TTCN PAM
uucaauuuuuauuuagcgga

SEQ ID NO: 4632 - RNA, 20 nt, Artificial Sequence
  targeting sequence with TTCN PAM
auuuuuauuuagcggaaggc

SEQ ID NO: 4633 - RNA, 20 nt, Artificial Sequence
  targeting sequence with TTCN PAM
gcuaaauaaaaauugaauga

SEQ ID NO: 4634 - RNA, 20 nt, Artificial Sequence
  targeting sequence with TTCN PAM
gaugggucuuugaagcauua

SEQ ID NO: 4635 - RNA, 20 nt, Artificial Sequence
  targeting sequence with TTCN PAM
aagacccaucugaaaaugcc

SEQ ID NO: 4636 - RNA, 20 nt, Artificial Sequence
  targeting sequence with TTCN PAM
gcgaugauggugucaugaga

SEQ ID NO: 4637 - RNA, 20 nt, Artificial Sequence
  targeting sequence with TTCN PAM
caugacaccaucaucgcuga

SEQ ID NO: 4638 - RNA, 20 nt, Artificial Sequence
  targeting sequence with TTCN PAM
aggauuaggagguaccauga

SEQ ID NO: 4639 - RNA, 20 nt, Artificial Sequence
  targeting sequence with TTCN PAM
ugguaccuccuaauccuaga

SEQ ID NO: 4640 - RNA, 20 nt, Artificial Sequence
  targeting sequence with TTCN PAM
cagcucuguaucuuuguuca

SEQ ID NO: 4641 - RNA, 20 nt, Artificial Sequence
  targeting sequence with TTCN PAM
accucugguuuucccagcuc

SEQ ID NO: 4642 - RNA, 20 nt, Artificial Sequence
  targeting sequence with TTCN PAM
uuuucuuuuuuuuuugagau

SEQ ID NO: 4643 - RNA, 20 nt, Artificial Sequence
  targeting sequence with TTCN PAM
uuuuuuuuugagauggaguu

SEQ ID NO: 4644 - RNA, 20 nt, Artificial Sequence
  targeting sequence with TTCN PAM
cucuuguugcccaggcugga

SEQ ID NO: 4645 - RNA, 20 nt, Artificial Sequence
  targeting sequence with TTCN PAM
agugguucuccugccucagc

SEQ ID NO: 4646 - RNA, 20 nt, Artificial Sequence
  targeting sequence with TTCN PAM
ccugccucagccucccaaga

SEQ ID NO: 4647 - RNA, 20 nt, Artificial Sequence
  targeting sequence with TTCN PAM
ugggaggcugaggcaggaga

SEQ ID NO: 4648 - RNA, 20 nt, Artificial Sequence
  targeting sequence with TTCN PAM
cuacuaaaaauacaaaaauu

SEQ ID NO: 4649 - RNA, 20 nt, Artificial Sequence
  targeting sequence with TTCN PAM
ccacguuggccaggcuaguc

SEQ ID NO: 4650 - RNA, 20 nt, Artificial Sequence
  targeting sequence with TTCN PAM
agcacuuugggaggcugagg

SEQ ID NO: 4651 - RNA, 20 nt, Artificial Sequence
  targeting sequence with TTCN PAM
uuauccaccgucugaaaugu

SEQ ID NO: 4652 - RNA, 20 nt, Artificial Sequence
  targeting sequence with TTCN PAM
gacgguggauaaagaacugu

SEQ ID NO: 4653 - RNA, 20 nt, Artificial Sequence
  targeting sequence with TTCN PAM
uaacauuuuacauuucagac

SEQ ID NO: 4654 - RNA, 20 nt, Artificial Sequence
  targeting sequence with TTCN PAM
cgucaggugcuaccaucaaa

SEQ ID NO: 4655 - RNA, 20 nt, Artificial Sequence
  targeting sequence with TTCN PAM
cacaacuaaauuaaaaauaa

SEQ ID NO: 4656 - RNA, 20 nt, Artificial Sequence
  targeting sequence with TTCN PAM
uauauuuugcugcauagauu

SEQ ID NO: 4657 - RNA, 20 nt, Artificial Sequence
  targeting sequence with TTCN PAM
uccaagcagacucugauugc

SEQ ID NO: 4658 - RNA, 20 nt, Artificial Sequence
  targeting sequence with TTCN PAM
aagcagacucugauugccca

SEQ ID NO: 4659 - RNA, 20 nt, Artificial Sequence
  targeting sequence with TTCN PAM
aaaauccaaacaaguucuga

SEQ ID NO: 4660 - RNA, 20 nt, Artificial Sequence
  targeting sequence with TTCN PAM
gagguucaaaaccguuuugg

SEQ ID NO: 4661 - RNA, 20 nt, Artificial Sequence
  targeting sequence with TTCN PAM
aaaccguuuuggcccuaagg

SEQ ID NO: 4662 - RNA, 20 nt, Artificial Sequence
  targeting sequence with TTCN PAM
acucugacuggaguccaaga

SEQ ID NO: 4663 - RNA, 20 nt, Artificial Sequence
  targeting sequence with TTCN PAM
ugaggcuguggggagccagu

SEQ ID NO: 4664 - RNA, 20 nt, Artificial Sequence
  targeting sequence with TTCN PAM
cuggcuccccacagccucau

SEQ ID NO: 4665 - RNA, 20 nt, Artificial Sequence
  targeting sequence with TTCN PAM
uaagcagguaugucugccug

SEQ ID NO: 4666 - RNA, 20 nt, Artificial Sequence
  targeting sequence with TTCN PAM
acaugagauuuggaggggac

SEQ ID NO: 4667 - RNA, 20 nt, Artificial Sequence
  targeting sequence with TTCN PAM
aacacugaggaccaaauuuc

SEQ ID NO: 4668 - RNA, 20 nt, Artificial Sequence
  targeting sequence with TTCN PAM
ucccccaugacccaaacacc

SEQ ID NO: 4669 - RNA, 20 nt, Artificial Sequence
  targeting sequence with TTCN PAM
cagggguuccucccccauga

SEQ ID NO: 4670 - RNA, 20 nt, Artificial Sequence
  targeting sequence with TTCN PAM
cccgcuaugauuucccuuga

SEQ ID NO: 4671 - RNA, 20 nt, Artificial Sequence
  targeting sequence with TTCN PAM
cuugaaggcugauuauuaaa

SEQ ID NO: 4672 - RNA, 20 nt, Artificial Sequence
  targeting sequence with TTCN PAM
agggaaaucauagcgggaga

SEQ ID NO: 4673 - RNA, 20 nt, Artificial Sequence
  targeting sequence with TTCN PAM
cucuugcuucuucucuugcc

SEQ ID NO: 4674 - RNA, 20 nt, Artificial Sequence
  targeting sequence with TTCN PAM
ucucuugccaugugauugau

SEQ ID NO: 4675 - RNA, 20 nt, Artificial Sequence
  targeting sequence with TTCN PAM
cuugccaugugauugaucuc

SEQ ID NO: 4676 - RNA, 20 nt, Artificial Sequence
  targeting sequence with TTCN PAM
ccuucugccaucagugaaag

SEQ ID NO: 4677 - RNA, 20 nt, Artificial Sequence
  targeting sequence with TTCN PAM
gccaucagugaaagcagcuu

SEQ ID NO: 4678 - RNA, 20 nt, Artificial Sequence
  targeting sequence with TTCN PAM
cugauggcagaaggugaagg

SEQ ID NO: 4679 - RNA, 20 nt, Artificial Sequence
  targeting sequence with TTCN PAM
ggugagggccuuaagcugcu

SEQ ID NO: 4680 - RNA, 20 nt, Artificial Sequence
  targeting sequence with TTCN PAM
uggagagcuugcagaaucau

SEQ ID NO: 4681 - RNA, 20 nt, Artificial Sequence
  targeting sequence with TTCN PAM
gcaagcucuccaggaagcau

SEQ ID NO: 4682 - RNA, 20 nt, Artificial Sequence
  targeting sequence with TTCN PAM
gcucaugauucugcaagcuc

SEQ ID NO: 4683 - RNA, 20 nt, Artificial Sequence
  targeting sequence with TTCN PAM
uuguaaauuacucaccuuca

SEQ ID NO: 4684 - RNA, 20 nt, Artificial Sequence
  targeting sequence with TTCN PAM
gguauuccuuuauauagcaa

SEQ ID NO: 4685 - RNA, 20 nt, Artificial Sequence
  targeting sequence with TTCN PAM
uuuauauagcaacacaaaag

SEQ ID NO: 4686 - RNA, 20 nt, Artificial Sequence
  targeting sequence with TTCN PAM
cucucuuuaagaaguguugc

SEQ ID NO: 4687 - RNA, 20 nt, Artificial Sequence
  targeting sequence with TTCN PAM
uaaagagagagaaaagucaa

SEQ ID NO: 4688 - RNA, 20 nt, Artificial Sequence
  targeting sequence with TTCN PAM
gccugcauuuguagagcauc

SEQ ID NO: 4689 - RNA, 20 nt, Artificial Sequence
  targeting sequence with TTCN PAM
cagcaggccuaugucauagg

SEQ ID NO: 4690 - RNA, 20 nt, Artificial Sequence
  targeting sequence with TTCN PAM
agcuccaauauuuacugguu

SEQ ID NO: 4691 - RNA, 20 nt, Artificial Sequence
  targeting sequence with TTCN PAM
gguccacgguuuccuggcuc

SEQ ID NO: 4692 - RNA, 20 nt, Artificial Sequence
  targeting sequence with TTCN PAM
uggcuccaaagcccaugauu

SEQ ID NO: 4693 - RNA, 20 nt, Artificial Sequence
  targeting sequence with TTCN PAM
cucaauuuauucugacuggg

SEQ ID NO: 4694 - RNA, 20 nt, Artificial Sequence
  targeting sequence with TTCN PAM
gacuggggcaugggggaggg

SEQ ID NO: 4695 - RNA, 20 nt, Artificial Sequence
  targeting sequence with TTCN PAM
ucuguaccugcacccagcuc

SEQ ID NO: 4696 - RNA, 20 nt, Artificial Sequence
  targeting sequence with TTCN PAM
cauuuuugccugaauggcac

SEQ ID NO: 4697 - RNA, 20 nt, Artificial Sequence
  targeting sequence with TTCN PAM
ggcaaaaaugggaacuacgg

SEQ ID NO: 4698 - RNA, 20 nt, Artificial Sequence
  targeting sequence with TTCN PAM
aaugugccauucaggcaaaa

SEQ ID NO: 4699 - RNA, 20 nt, Artificial Sequence
  targeting sequence with TTCN PAM
caugguuauauaacacuuuc

SEQ ID NO: 4700 - RNA, 20 nt, Artificial Sequence
  targeting sequence with TTCN PAM
uuaauuugcuuuuugguccg

SEQ ID NO: 4701 - RNA, 20 nt, Artificial Sequence
  targeting sequence with TTCN PAM
uuaucaucuacuauacucug

SEQ ID NO: 4702 - RNA, 20 nt, Artificial Sequence
  targeting sequence with TTCN PAM
uccaugucaucauguuccuc

SEQ ID NO: 4703 - RNA, 20 nt, Artificial Sequence
  targeting sequence with TTCN PAM
augucaucauguuccuccuu

SEQ ID NO: 4704 - RNA, 20 nt, Artificial Sequence
  targeting sequence with TTCN PAM
uccuugcauggggccaggau

SEQ ID NO: 4705 - RNA, 20 nt, Artificial Sequence
  targeting sequence with TTCN PAM
gcaccaccacguaggugcca

SEQ ID NO: 4706 - RNA, 20 nt, Artificial Sequence
  targeting sequence with TTCN PAM
auggccuucuuccuggcuuc

SEQ ID NO: 4707 - RNA, 20 nt, Artificial Sequence
  targeting sequence with TTCN PAM
uccuggcuuccuggugaaga

SEQ ID NO: 4708 - RNA, 20 nt, Artificial Sequence
  targeting sequence with TTCN PAM
uggcuuccuggugaagauga

SEQ ID NO: 4709 - RNA, 20 nt, Artificial Sequence
  targeting sequence with TTCN PAM
uggugaagaugaguggcgac

SEQ ID NO: 4710 - RNA, 20 nt, Artificial Sequence
  targeting sequence with TTCN PAM
ccaggaagccaggaagaagg

SEQ ID NO: 4711 - RNA, 20 nt, Artificial Sequence
  targeting sequence with TTCN PAM
caaaaaggguggcucaccag

SEQ ID NO: 4712 - RNA, 20 nt, Artificial Sequence
  targeting sequence with TTCN PAM
ugauagggcugggccacugc

SEQ ID NO: 4713 - RNA, 20 nt, Artificial Sequence
  targeting sequence with TTCN PAM
gcaaugggccuacuaagcac

SEQ ID NO: 4714 - RNA, 20 nt, Artificial Sequence
  targeting sequence with TTCN PAM
gauuuucagcaaugggccua

SEQ ID NO: 4715 - RNA, 20 nt, Artificial Sequence
  targeting sequence with TTCN PAM
guauagaauucccuuuaagc

SEQ ID NO: 4716 - RNA, 20 nt, Artificial Sequence
  targeting sequence with TTCN PAM
auacagaaagccaguaguua

SEQ ID NO: 4717 - RNA, 20 nt, Artificial Sequence
  targeting sequence with TTCN PAM
cuuuaagccuggccaugccc

SEQ ID NO: 4718 - RNA, 20 nt, Artificial Sequence
  targeting sequence with TTCN PAM
uuugaaagacgaggagacug

SEQ ID NO: 4719 - RNA, 20 nt, Artificial Sequence
  targeting sequence with TTCN PAM
aaugaagauagacguaccac

SEQ ID NO: 4720 - RNA, 20 nt, Artificial Sequence
  targeting sequence with TTCN PAM
gucuccucgucuuucaaaug

SEQ ID NO: 4721 - RNA, 20 nt, Artificial Sequence
  targeting sequence with TTCN PAM
gaggggaccacacagacagc

SEQ ID NO: 4722 - RNA, 20 nt, Artificial Sequence
  targeting sequence with TTCN PAM
ugugccaaugcaucugcugc

SEQ ID NO: 4723 - RNA, 20 nt, Artificial Sequence
  targeting sequence with TTCN PAM
guaggcagcagaugcauugg

SEQ ID NO: 4724 - RNA, 20 nt, Artificial Sequence
  targeting sequence with TTCN PAM
guggagccugagucauuuua

SEQ ID NO: 4725 - RNA, 20 nt, Artificial Sequence
  targeting sequence with TTCN PAM
uuugaagcuguugcuaucca

SEQ ID NO: 4726 - RNA, 20 nt, Artificial Sequence
  targeting sequence with TTCN PAM
aaggaauuuuggacccuaga

SEQ ID NO: 4727 - RNA, 20 nt, Artificial Sequence
  targeting sequence with TTCN PAM
cucuggauagcaacagcuuc

SEQ ID NO: 4728 - RNA, 20 nt, Artificial Sequence
  targeting sequence with TTCN PAM
uuaggacaggguggcccucc

SEQ ID NO: 4729 - RNA, 20 nt, Artificial Sequence
  targeting sequence with TTCN PAM
guggaggggcagaaagggga

SEQ ID NO: 4730 - RNA, 20 nt, Artificial Sequence
  targeting sequence with TTCN PAM
gccccuccaccgaagaugug

SEQ ID NO: 4731 - RNA, 20 nt, Artificial Sequence
  targeting sequence with TTCN PAM
ccucacccuggcccuagugc

SEQ ID NO: 4732 - RNA, 20 nt, Artificial Sequence
  targeting sequence with TTCN PAM
aaucuuaaaaaaacguuuuu

SEQ ID NO: 4733 - RNA, 20 nt, Artificial Sequence
  targeting sequence with TTCN PAM
gcaccaccuucuagcccacc

SEQ ID NO: 4734 - RNA, 20 nt, Artificial Sequence
  targeting sequence with TTCN PAM
agcccaccucguuuccuggc

SEQ ID NO: 4735 - RNA, 20 nt, Artificial Sequence
  targeting sequence with TTCN PAM
uggccucuaacuugaugaga

SEQ ID NO: 4736 - RNA, 20 nt, Artificial Sequence
  targeting sequence with TTCN PAM
cacugauucuccacauggca

SEQ ID NO: 4737 - RNA, 20 nt, Artificial Sequence
  targeting sequence with TTCN PAM
ccacauggcaggcggugcuu

SEQ ID NO: 4738 - RNA, 20 nt, Artificial Sequence
  targeting sequence with TTCN PAM
uagccuccugcagacaguga

SEQ ID NO: 4739 - RNA, 20 nt, Artificial Sequence
  targeting sequence with TTCN PAM
gccacgguaugcugagcuga

SEQ ID NO: 4740 - RNA, 20 nt, Artificial Sequence
  targeting sequence with TTCN PAM
aaggcagggacccugucaau

SEQ ID NO: 4741 - RNA, 20 nt, Artificial Sequence
  targeting sequence with TTCN PAM
aucagucugcucaacacacg

SEQ ID NO: 4742 - RNA, 20 nt, Artificial Sequence
  targeting sequence with TTCN PAM
ccucugcagcacacaguagg

SEQ ID NO: 4743 - RNA, 20 nt, Artificial Sequence
  targeting sequence with TTCN PAM
cuugagcuuacaguucagga

SEQ ID NO: 4744 - RNA, 20 nt, Artificial Sequence
  targeting sequence with TTCN PAM
ggaggagagacugaccagug

SEQ ID NO: 4745 - RNA, 20 nt, Artificial Sequence
  targeting sequence with TTCN PAM
ucucuccccaaggcugagca

SEQ ID NO: 4746 - RNA, 20 nt, Artificial Sequence
  targeting sequence with TTCN PAM
ucgucucuccccaaggcuga

SEQ ID NO: 4747 - RNA, 20 nt, Artificial Sequence
  targeting sequence with TTCN PAM
gcuuggccuacucuccucug

SEQ ID NO: 4748 - RNA, 20 nt, Artificial Sequence
  targeting sequence with TTCN PAM
guuugccuucugcuuggccu

SEQ ID NO: 4749 - RNA, 20 nt, Artificial Sequence
  targeting sequence with TTCN PAM
aacugggcaucauaccagcc

SEQ ID NO: 4750 - RNA, 20 nt, Artificial Sequence
  targeting sequence with TTCN PAM
aguccugcccagccccuuau

SEQ ID NO: 4751 - RNA, 20 nt, Artificial Sequence
  targeting sequence with TTCN PAM
ccucucugagccucauuccu

SEQ ID NO: 4752 - RNA, 20 nt, Artificial Sequence
  targeting sequence with TTCN PAM
ucuaucuguaaaccaguuau

SEQ ID NO: 4753 - RNA, 20 nt, Artificial Sequence
  targeting sequence with TTCN PAM
aauuauuauaacugguuuac

SEQ ID NO: 4754 - RNA, 20 nt, Artificial Sequence
  targeting sequence with TTCN PAM
uuuaaggacuaaaugagguc

SEQ ID NO: 4755 - RNA, 20 nt, Artificial Sequence
  targeting sequence with TTCN PAM
cgaccucauuuaguccuuaa

SEQ ID NO: 4756 - RNA, 20 nt, Artificial Sequence
  targeting sequence with TTCN PAM
gcagaugcuagguacggaaa

SEQ ID NO: 4757 - RNA, 20 nt, Artificial Sequence
  targeting sequence with TTCN PAM
guaccuagcaucugcugaau

SEQ ID NO: 4758 - RNA, 20 nt, Artificial Sequence
  targeting sequence with TTCN PAM
gcgaguuuccguaccuagca

SEQ ID NO: 4759 - RNA, 20 nt, Artificial Sequence
  targeting sequence with TTCN PAM
uaaccugcccccacuucagc

SEQ ID NO: 4760 - RNA, 20 nt, Artificial Sequence
  targeting sequence with TTCN PAM
uauccccagaggcuucuuaa

SEQ ID NO: 4761 - RNA, 20 nt, Artificial Sequence
  targeting sequence with TTCN PAM
gaccuaagugguaacagccu

SEQ ID NO: 4762 - RNA, 20 nt, Artificial Sequence
  targeting sequence with TTCN PAM
cucuccuuacccuucagacc

SEQ ID NO: 4763 - RNA, 20 nt, Artificial Sequence
  targeting sequence with TTCN PAM
cucugcccaguuggagccgg

SEQ ID NO: 4764 - RNA, 20 nt, Artificial Sequence
  targeting sequence with TTCN PAM
ccacaggcagccucuccucc

SEQ ID NO: 4765 - RNA, 20 nt, Artificial Sequence
  targeting sequence with TTCN PAM
ccgcugccaugcgcagggag

SEQ ID NO: 4766 - RNA, 20 nt, Artificial Sequence
  targeting sequence with TTCN PAM
agcucacugcaaccucugcc

SEQ ID NO: 4767 - RNA, 20 nt, Artificial Sequence
  targeting sequence with TTCN PAM
agcgauucuccugccucagc

SEQ ID NO: 4768 - RNA, 20 nt, Artificial Sequence
  targeting sequence with TTCN PAM
ccugccucagccucccgagu

SEQ ID NO: 4769 - RNA, 20 nt, Artificial Sequence
  targeting sequence with TTCN PAM
ccauguuggccaggcugguc

SEQ ID NO: 4770 - RNA, 20 nt, Artificial Sequence
  targeting sequence with TTCN PAM
agaccagccuggccaacaug

SEQ ID NO: 4771 - RNA, 20 nt, Artificial Sequence
  targeting sequence with TTCN PAM
aacuccugcuagugccuccc

SEQ ID NO: 4772 - RNA, 20 nt, Artificial Sequence
  targeting sequence with TTCN PAM
aguugggcucagccaauggg

SEQ ID NO: 4773 - RNA, 20 nt, Artificial Sequence
  targeting sequence with TTCN PAM
ccagccugcucagugcaaac

SEQ ID NO: 4774 - RNA, 20 nt, Artificial Sequence
  targeting sequence with TTCN PAM
ccagccuucuccagccugcu

SEQ ID NO: 4775 - RNA, 20 nt, Artificial Sequence
  targeting sequence with TTCN PAM
guuuguccccuagucuauuc

SEQ ID NO: 4776 - RNA, 20 nt, Artificial Sequence
  targeting sequence with TTCN PAM
cuccauguccauccugccca

SEQ ID NO: 4777 - RNA, 20 nt, Artificial Sequence
  targeting sequence with TTCN PAM
gaauccuuccuaaaaggaau

SEQ ID NO: 4778 - RNA, 20 nt, Artificial Sequence
  targeting sequence with TTCN PAM
gaacuugacaucuugucugg

SEQ ID NO: 4779 - RNA, 20 nt, Artificial Sequence
  targeting sequence with TTCN PAM
uaaaaggaauccucuaugcc

SEQ ID NO: 4780 - RNA, 20 nt, Artificial Sequence
  targeting sequence with TTCN PAM
uuuuaggaaggauucugaac

SEQ ID NO: 4781 - RNA, 20 nt, Artificial Sequence
  targeting sequence with TTCN PAM
cgcuccuugaucaggcuggg

SEQ ID NO: 4782 - RNA, 20 nt, Artificial Sequence
  targeting sequence with TTCN PAM
gcaggccuugaaguugcccc

SEQ ID NO: 4783 - RNA, 20 nt, Artificial Sequence
  targeting sequence with TTCN PAM
aggccugcagaagccagaga

SEQ ID NO: 4784 - RNA, 20 nt, Artificial Sequence
  targeting sequence with TTCN PAM
acgggaugcucugggcaaag

SEQ ID NO: 4785 - RNA, 20 nt, Artificial Sequence
  targeting sequence with TTCN PAM
uccgcccgguaccguggagg

SEQ ID NO: 4786 - RNA, 20 nt, Artificial Sequence
  targeting sequence with TTCN PAM
gcucagaugggguggggcag

SEQ ID NO: 4787 - RNA, 20 nt, Artificial Sequence
  targeting sequence with TTCN PAM
acuucucggggggcuuuggg

SEQ ID NO: 4788 - RNA, 20 nt, Artificial Sequence
  targeting sequence with TTCN PAM
cggggggcuuugggacucag

SEQ ID NO: 4789 - RNA, 20 nt, Artificial Sequence
  targeting sequence with TTCN PAM
gucccauccccauccccugc

SEQ ID NO: 4790 - RNA, 20 nt, Artificial Sequence
  targeting sequence with TTCN PAM
uguugccccacaaaugcaaa

SEQ ID NO: 4791 - RNA, 20 nt, Artificial Sequence
  targeting sequence with TTCN PAM
uucuuuucucuuguuuuccu

SEQ ID NO: 4792 - RNA, 20 nt, Artificial Sequence
  targeting sequence with TTCN PAM
uuucucuuguuuuccuuuuc

SEQ ID NO: 4793 - RNA, 20 nt, Artificial Sequence
  targeting sequence with TTCN PAM
cuuguuuuccuuuucucacc

SEQ ID NO: 4794 - RNA, 20 nt, Artificial Sequence
  targeting sequence with TTCN PAM
uuuucucaccauuuggaaug

SEQ ID NO: 4795 - RNA, 20 nt, Artificial Sequence
  targeting sequence with TTCN PAM
caccauuuggaauggcccag

SEQ ID NO: 4796 - RNA, 20 nt, Artificial Sequence
  targeting sequence with TTCN PAM
aaauggugagaaaaggaaaa

SEQ ID NO: 4797 - RNA, 20 nt, Artificial Sequence
  targeting sequence with TTCN PAM
aagguaagugcagccugcug

SEQ ID NO: 4798 - RNA, 20 nt, Artificial Sequence
  targeting sequence with TTCN PAM
ucugauggugacucuaccua

SEQ ID NO: 4799 - RNA, 20 nt, Artificial Sequence
  targeting sequence with TTCN PAM
uguuuugcugcuccaccugc

SEQ ID NO: 4800 - RNA, 20 nt, Artificial Sequence
  targeting sequence with TTCN PAM
uggggcucccugccugggcc

SEQ ID NO: 4801 - RNA, 20 nt, Artificial Sequence
  targeting sequence with TTCN PAM
cucuaggccuuucuuuccac

SEQ ID NO: 4802 - RNA, 20 nt, Artificial Sequence
  targeting sequence with TTCN PAM
uuccacuguucccucugccu

SEQ ID NO: 4803 - RNA, 20 nt, Artificial Sequence
  targeting sequence with TTCN PAM
acuguucccucugccuggug

SEQ ID NO: 4804 - RNA, 20 nt, Artificial Sequence
  targeting sequence with TTCN PAM
cucugccugguguggccugg

SEQ ID NO: 4805 - RNA, 20 nt, Artificial Sequence
  targeting sequence with TTCN PAM
auagccaggccacaccaggc

SEQ ID NO: 4806 - RNA, 20 nt, Artificial Sequence
  targeting sequence with TTCN PAM
auggccgcuccuccucccuc

SEQ ID NO: 4807 - RNA, 20 nt, Artificial Sequence
  targeting sequence with TTCN PAM
agcagggacuugcagguggc

SEQ ID NO: 4808 - RNA, 20 nt, Artificial Sequence
  targeting sequence with TTCN PAM
gucggggaagacucuagaug

SEQ ID NO: 4809 - RNA, 20 nt, Artificial Sequence
  targeting sequence with TTCN PAM
ccgacugaauugccaccugc

SEQ ID NO: 4810 - RNA, 20 nt, Artificial Sequence
  targeting sequence with TTCN PAM
cuccucaggccaggugcauc

SEQ ID NO: 4811 - RNA, 20 nt, Artificial Sequence
  targeting sequence with TTCN PAM
uucucuccucaggccaggug

SEQ ID NO: 4812 - RNA, 20 nt, Artificial Sequence
  targeting sequence with TTCN PAM
aguuggacuguguuaaguuu

SEQ ID NO: 4813 - RNA, 20 nt, Artificial Sequence
  targeting sequence with TTCN PAM
ccccaagcucugcguccugg

SEQ ID NO: 4814 - RNA, 20 nt, Artificial Sequence
  targeting sequence with TTCN PAM
ccccuuaccgguucucgugg

SEQ ID NO: 4815 - RNA, 20 nt, Artificial Sequence
  targeting sequence with TTCN PAM
cgugggaucuugggaagcca

SEQ ID NO: 4816 - RNA, 20 nt, Artificial Sequence
  targeting sequence with TTCN PAM
caagaucccacgagaaccgg

SEQ ID NO: 4817 - RNA, 20 nt, Artificial Sequence
  targeting sequence with TTCN PAM
ucuaugagcuuugucguucu

SEQ ID NO: 4818 - RNA, 20 nt, Artificial Sequence
  targeting sequence with TTCN PAM
augagcuuugucguucuugu

SEQ ID NO: 4819 - RNA, 20 nt, Artificial Sequence
  targeting sequence with TTCN PAM
ugucuguaaaaugggcacau

SEQ ID NO: 4820 - RNA, 20 nt, Artificial Sequence
  targeting sequence with TTCN PAM
cacagguugcugugagacuc

SEQ ID NO: 4821 - RNA, 20 nt, Artificial Sequence
  targeting sequence with TTCN PAM
acucauuggagucucacagc

SEQ ID NO: 4822 - RNA, 20 nt, Artificial Sequence
  targeting sequence with TTCN PAM
aaaagcaucugcacauccuu

SEQ ID NO: 4823 - RNA, 20 nt, Artificial Sequence
  targeting sequence with TTCN PAM
cuuccaaaagcaucugcaca

SEQ ID NO: 4824 - RNA, 20 nt, Artificial Sequence
  targeting sequence with TTCN PAM
ccacacccagcccaccagcu

SEQ ID NO: 4825 - RNA, 20 nt, Artificial Sequence
  targeting sequence with TTCN PAM
gcugcugccacccuugccag

SEQ ID NO: 4826 - RNA, 20 nt, Artificial Sequence
  targeting sequence with TTCN PAM
uacagaggagcuguccucuc

SEQ ID NO: 4827 - RNA, 20 nt, Artificial Sequence
  targeting sequence with TTCN PAM
uuuccaaccaggugagaccu

SEQ ID NO: 4828 - RNA, 20 nt, Artificial Sequence
  targeting sequence with TTCN PAM
aaccaggugagaccucuuca

SEQ ID NO: 4829 - RNA, 20 nt, Artificial Sequence
  targeting sequence with TTCN PAM
guggagcccuggagcccccu

SEQ ID NO: 4830 - RNA, 20 nt, Artificial Sequence
  targeting sequence with TTCN PAM
cagucccugccuggacuggg

SEQ ID NO: 4831 - RNA, 20 nt, Artificial Sequence
  targeting sequence with TTCN PAM
uagcacugcugugacaaauu

SEQ ID NO: 4832 - RNA, 20 nt, Artificial Sequence
  targeting sequence with TTCN PAM
aaccgagggggugguaauuu

SEQ ID NO: 4833 - RNA, 20 nt, Artificial Sequence
  targeting sequence with TTCN PAM
cugcaguccuggaggccaga

SEQ ID NO: 4834 - RNA, 20 nt, Artificial Sequence
  targeting sequence with TTCN PAM
ggccuccaggacugcagaga

SEQ ID NO: 4835 - RNA, 20 nt, Artificial Sequence
  targeting sequence with TTCN PAM
ggcuucuggccuccaggacu

SEQ ID NO: 4836 - RNA, 20 nt, Artificial Sequence
  targeting sequence with TTCN PAM
cccggggggcuccagggaga

SEQ ID NO: 4837 - RNA, 20 nt, Artificial Sequence
  targeting sequence with TTCN PAM
cccuggagccccccgggaga

SEQ ID NO: 4838 - RNA, 20 nt, Artificial Sequence
  targeting sequence with TTCN PAM
cuugccucuuccguguccca

SEQ ID NO: 4839 - RNA, 20 nt, Artificial Sequence
  targeting sequence with TTCN PAM
gugucccaacagcggcagca

SEQ ID NO: 4840 - RNA, 20 nt, Artificial Sequence
  targeting sequence with TTCN PAM
cacagccuucucugugucuc

SEQ ID NO: 4841 - RNA, 20 nt, Artificial Sequence
  targeting sequence with TTCN PAM
cugugucucucuccucuuca

SEQ ID NO: 4842 - RNA, 20 nt, Artificial Sequence
  targeting sequence with TTCN PAM
uugucucauaaggacacuug

SEQ ID NO: 4843 - RNA, 20 nt, Artificial Sequence
  targeting sequence with TTCN PAM
ccacaugagaucauccugga

SEQ ID NO: 4844 - RNA, 20 nt, Artificial Sequence
  targeting sequence with TTCN PAM
aaauaaggucacagccacag

SEQ ID NO: 4845 - RNA, 20 nt, Artificial Sequence
  targeting sequence with TTCN PAM
cuccucucccuugggccaga

SEQ ID NO: 4846 - RNA, 20 nt, Artificial Sequence
  targeting sequence with TTCN PAM
ggcccaagggagaggaggga

SEQ ID NO: 4847 - RNA, 20 nt, Artificial Sequence
  targeting sequence with TTCN PAM
uccccauaggaugcccaugg

SEQ ID NO: 4848 - RNA, 20 nt, Artificial Sequence
  targeting sequence with TTCN PAM
ccauaggaugcccauggauu

SEQ ID NO: 4849 - RNA, 20 nt, Artificial Sequence
  targeting sequence with TTCN PAM
cgcuucccccgagugucugu

SEQ ID NO: 4850 - RNA, 20 nt, Artificial Sequence
  targeting sequence with TTCN PAM
cccgagugucugugggaggu

SEQ ID NO: 4851 - RNA, 20 nt, Artificial Sequence
  targeting sequence with TTCN PAM
ugccaccucccacagacacu

SEQ ID NO: 4852 - RNA, 20 nt, Artificial Sequence
  targeting sequence with TTCN PAM
acaccccugccugccauucc

SEQ ID NO: 4853 - RNA, 20 nt, Artificial Sequence
  targeting sequence with TTCN PAM
ggagucauaucaagggcuug

SEQ ID NO: 4854 - RNA, 20 nt, Artificial Sequence
  targeting sequence with TTCN PAM
uccagccaagcccuugauau

SEQ ID NO: 4855 - RNA, 20 nt, Artificial Sequence
  targeting sequence with TTCN PAM
ucauucauggggaggccaca

SEQ ID NO: 4856 - RNA, 20 nt, Artificial Sequence
  targeting sequence with TTCN PAM
uucauggggaggccacaagc

SEQ ID NO: 4857 - RNA, 20 nt, Artificial Sequence
  targeting sequence with TTCN PAM
uggggaggccacaagcaugg

SEQ ID NO: 4858 - RNA, 20 nt, Artificial Sequence
  targeting sequence with TTCN PAM
gguuccucugcaaaagggag

SEQ ID NO: 4859 - RNA, 20 nt, Artificial Sequence
  targeting sequence with TTCN PAM
ucugcaaaagggagguaaug

SEQ ID NO: 4860 - RNA, 20 nt, Artificial Sequence
  targeting sequence with TTCN PAM
cugucagguauugagugagg

SEQ ID NO: 4861 - RNA, 20 nt, Artificial Sequence
  targeting sequence with TTCN PAM
uuucuuaccauucaauaaua

SEQ ID NO: 4862 - RNA, 20 nt, Artificial Sequence
  targeting sequence with TTCN PAM
uaccauucaauaauaacguu

SEQ ID NO: 4863 - RNA, 20 nt, Artificial Sequence
  targeting sequence with TTCN PAM
auaauaacguuuugagcacc

SEQ ID NO: 4864 - RNA, 20 nt, Artificial Sequence
  targeting sequence with TTCN PAM
cauuuguauccccagcaccu

SEQ ID NO: 4865 - RNA, 20 nt, Artificial Sequence
  targeting sequence with TTCN PAM
uucacauuuguauccccagc

SEQ ID NO: 4866 - RNA, 20 nt, Artificial Sequence
  targeting sequence with TTCN PAM
uuucauucacauuuguaucc

SEQ ID NO: 4867 - RNA, 20 nt, Artificial Sequence
  targeting sequence with TTCN PAM
cccaacaguguauccagaag

SEQ ID NO: 4868 - RNA, 20 nt, Artificial Sequence
  targeting sequence with TTCN PAM
ggauacacuguugggggaag

SEQ ID NO: 4869 - RNA, 20 nt, Artificial Sequence
  targeting sequence with TTCN PAM
uuaaacaaaugcuacuugac

SEQ ID NO: 4870 - RNA, 20 nt, Artificial Sequence
  targeting sequence with TTCN PAM
ggauaggcugagagcucuga

SEQ ID NO: 4871 - RNA, 20 nt, Artificial Sequence
  targeting sequence with TTCN PAM
gagcucucagccuauccaga

SEQ ID NO: 4872 - RNA, 20 nt, Artificial Sequence
  targeting sequence with TTCN PAM
gcuggauacacaggcucgca

SEQ ID NO: 4873 - RNA, 20 nt, Artificial Sequence
  targeting sequence with TTCN PAM
ugauccuucugcuggauaca

SEQ ID NO: 4874 - RNA, 20 nt, Artificial Sequence
  targeting sequence with TTCN PAM
uggaggaagcgcuguucuag

SEQ ID NO: 4875 - RNA, 20 nt, Artificial Sequence
  targeting sequence with TTCN PAM
uccaggaauccuuuccugau

SEQ ID NO: 4876 - RNA, 20 nt, Artificial Sequence
  targeting sequence with TTCN PAM
agccaagaccuacgggggca

SEQ ID NO: 4877 - RNA, 20 nt, Artificial Sequence
  targeting sequence with TTCN PAM
acugcuuggacaccgucccc

SEQ ID NO: 4878 - RNA, 20 nt, Artificial Sequence
  targeting sequence with TTCN PAM
uuccacugcuuggacaccgu

SEQ ID NO: 4879 - RNA, 20 nt, Artificial Sequence
  targeting sequence with TTCN PAM
auccacguucauuccacugc

SEQ ID NO: 4880 - RNA, 20 nt, Artificial Sequence
  targeting sequence with TTCN PAM
gcacaggccacacucccucc

SEQ ID NO: 4881 - RNA, 20 nt, Artificial Sequence
  targeting sequence with TTCN PAM
caucugaccuggaggccacc

SEQ ID NO: 4882 - RNA, 20 nt, Artificial Sequence
  targeting sequence with TTCN PAM
uuucacaucugaccuggagg

SEQ ID NO: 4883 - RNA, 20 nt, Artificial Sequence
  targeting sequence with TTCN PAM
uccuuucacaucugaccugg

SEQ ID NO: 4884 - RNA, 20 nt, Artificial Sequence
  targeting sequence with TTCN PAM
caggcguauggcagggcugc

SEQ ID NO: 4885 - RNA, 20 nt, Artificial Sequence
  targeting sequence with TTCN PAM
cucucaccaggcagcccugc

SEQ ID NO: 4886 - RNA, 20 nt, Artificial Sequence
  targeting sequence with TTCN PAM
agaggcuggaagaggccacu

SEQ ID NO: 4887 - RNA, 20 nt, Artificial Sequence
  targeting sequence with TTCN PAM
agccucuggaaagcucugug

SEQ ID NO: 4888 - RNA, 20 nt, Artificial Sequence
  targeting sequence with TTCN PAM
ugaggccaccuugccacgcu

SEQ ID NO: 4889 - RNA, 20 nt, Artificial Sequence
  targeting sequence with TTCN PAM
cugugacagcguggcaaggu

SEQ ID NO: 4890 - RNA, 20 nt, Artificial Sequence
  targeting sequence with TTCN PAM
aaacccccgggugaggcagg

SEQ ID NO: 4891 - RNA, 20 nt, Artificial Sequence
  targeting sequence with TTCN PAM
uaggccucccucuaucuucc

SEQ ID NO: 4892 - RNA, 20 nt, Artificial Sequence
  targeting sequence with TTCN PAM
agccucucacuggaaggaag

SEQ ID NO: 4893 - RNA, 20 nt, Artificial Sequence
  targeting sequence with TTCN PAM
agugagaggcuggaaagggg

SEQ ID NO: 4894 - RNA, 20 nt, Artificial Sequence
  targeting sequence with TTCN PAM
uuccagugagaggcuggaaa

SEQ ID NO: 4895 - RNA, 20 nt, Artificial Sequence
  targeting sequence with TTCN PAM
ugugggggcuuuuaccaggc

SEQ ID NO: 4896 - RNA, 20 nt, Artificial Sequence
  targeting sequence with TTCN PAM
ugcccgcucacaccagccca

SEQ ID NO: 4897 - RNA, 20 nt, Artificial Sequence
  targeting sequence with TTCN PAM
aagugcaggcgguuccugcc

SEQ ID NO: 4898 - RNA, 20 nt, Artificial Sequence
  targeting sequence with TTCN PAM
aucugccgcuggggccacac

SEQ ID NO: 4899 - RNA, 20 nt, Artificial Sequence
  targeting sequence with TTCN PAM
gcugcaagaugaugugacca

SEQ ID NO: 4900 - RNA, 20 nt, Artificial Sequence
  targeting sequence with TTCN PAM
ggucccacccgugcuuggga

SEQ ID NO: 4901 - RNA, 20 nt, Artificial Sequence
  targeting sequence with TTCN PAM
cuccucacacacgacgagga

SEQ ID NO: 4902 - RNA, 20 nt, Artificial Sequence
  targeting sequence with TTCN PAM
ucgucgugugugaggaggga

SEQ ID NO: 4903 - RNA, 20 nt, Artificial Sequence
  targeting sequence with TTCN PAM
aguccauguuccucgucgug

SEQ ID NO: 4904 - RNA, 20 nt, Artificial Sequence
  targeting sequence with TTCN PAM
gcucgaugugcguugugugg

SEQ ID NO: 4905 - RNA, 20 nt, Artificial Sequence
  targeting sequence with TTCN PAM
cucccuggacguaagccaca

SEQ ID NO: 4906 - RNA, 20 nt, Artificial Sequence
  targeting sequence with TTCN PAM
agauaagccuguauuccccg

SEQ ID NO: 4907 - RNA, 20 nt, Artificial Sequence
  targeting sequence with TTCN PAM
ccgggcugucugccaaugua

SEQ ID NO: 4908 - RNA, 20 nt, Artificial Sequence
  targeting sequence with TTCN PAM
aggcugacgggacaacugga

SEQ ID NO: 4909 - RNA, 20 nt, Artificial Sequence
  targeting sequence with TTCN PAM
cucagagcuuccaggcugac

SEQ ID NO: 4910 - RNA, 20 nt, Artificial Sequence
  targeting sequence with TTCN PAM
ugagcaccuguauccccugc

SEQ ID NO: 4911 - RNA, 20 nt, Artificial Sequence
  targeting sequence with TTCN PAM
acauuccauagcccagcuca

SEQ ID NO: 4912 - RNA, 20 nt, Artificial Sequence
  targeting sequence with TTCN PAM
auagcccagcucaauaucua

SEQ ID NO: 4913 - RNA, 20 nt, Artificial Sequence
  targeting sequence with TTCN PAM
ucuaggguggcgagcacugu

SEQ ID NO: 4914 - RNA, 20 nt, Artificial Sequence
  targeting sequence with TTCN PAM
ggucggagcucacagcgcuc

SEQ ID NO: 4915 - RNA, 20 nt, Artificial Sequence
  targeting sequence with TTCN PAM
caguguagcaccgggcacau

SEQ ID NO: 4916 - RNA, 20 nt, Artificial Sequence
  targeting sequence with TTCN PAM
cucaucaauaggcaucuacc

SEQ ID NO: 4917 - RNA, 20 nt, Artificial Sequence
  targeting sequence with TTCN PAM
guagcaugcugagcaggucc

SEQ ID NO: 4918 - RNA, 20 nt, Artificial Sequence
  targeting sequence with TTCN PAM
ucuguagcaugcugagcagg

SEQ ID NO: 4919 - RNA, 20 nt, Artificial Sequence
  targeting sequence with TTCN PAM
ugccgagacuggaggccuua

SEQ ID NO: 4920 - RNA, 20 nt, Artificial Sequence
  targeting sequence with TTCN PAM
gacugugcccagaccuacua

SEQ ID NO: 4921 - RNA, 20 nt, Artificial Sequence
  targeting sequence with TTCN PAM
ggcaaggucggcccccaguc

SEQ ID NO: 4922 - RNA, 20 nt, Artificial Sequence
  targeting sequence with TTCN PAM
ugugggaucucagagcagcc

SEQ ID NO: 4923 - RNA, 20 nt, Artificial Sequence
  targeting sequence with TTCN PAM
guggcugcucugagauccca

SEQ ID NO: 4924 - RNA, 20 nt, Artificial Sequence
  targeting sequence with TTCN PAM
ccaaauaaggucuggcucac

SEQ ID NO: 4925 - RNA, 20 nt, Artificial Sequence
  targeting sequence with TTCN PAM
cucauaaagacacaucacag

SEQ ID NO: 4926 - RNA, 20 nt, Artificial Sequence
  targeting sequence with TTCN PAM
ccaaucuccaccucugucuc

SEQ ID NO: 4927 - RNA, 20 nt, Artificial Sequence
  targeting sequence with TTCN PAM
cuggcuuguggccacauuuc

SEQ ID NO: 4928 - RNA, 20 nt, Artificial Sequence
  targeting sequence with TTCN PAM
gguggcugcugguguucccu

SEQ ID NO: 4929 - RNA, 20 nt, Artificial Sequence
  targeting sequence with TTCN PAM
ggcuucugguggcugcuggu

SEQ ID NO: 4930 - RNA, 20 nt, Artificial Sequence
  targeting sequence with TTCN PAM
ucccagagccuucgcugcug

SEQ ID NO: 4931 - RNA, 20 nt, Artificial Sequence
  targeting sequence with TTCN PAM
cagagccuucgcugcugagu

SEQ ID NO: 4932 - RNA, 20 nt, Artificial Sequence
  targeting sequence with TTCN PAM
cugcugagucugggaauuug

SEQ ID NO: 4933 - RNA, 20 nt, Artificial Sequence
  targeting sequence with TTCN PAM
cagacucagcagcgaaggcu

SEQ ID NO: 4934 - RNA, 20 nt, Artificial Sequence
  targeting sequence with TTCN PAM
gucacaaauucccagacuca

SEQ ID NO: 4935 - RNA, 20 nt, Artificial Sequence
  targeting sequence with TTCN PAM
uauggcuucggucacaaauu

SEQ ID NO: 4936 - RNA, 20 nt, Artificial Sequence
  targeting sequence with TTCN PAM
caucucaggacaggugagca

SEQ ID NO: 4937 - RNA, 20 nt, Artificial Sequence
  targeting sequence with TTCN PAM
gauggcacuucagaagacuc

SEQ ID NO: 4938 - RNA, 20 nt, Artificial Sequence
  targeting sequence with TTCN PAM
gaagacucaggagacccugg

SEQ ID NO: 4939 - RNA, 20 nt, Artificial Sequence
  targeting sequence with TTCN PAM
gaagugccaucugaacagca

SEQ ID NO: 4940 - RNA, 20 nt, Artificial Sequence
  targeting sequence with TTCN PAM
accugaggcccugcuuuucc

SEQ ID NO: 4941 - RNA, 20 nt, Artificial Sequence
  targeting sequence with TTCN PAM
uggcugcagggguuccaggg

SEQ ID NO: 4942 - RNA, 20 nt, Artificial Sequence
  targeting sequence with TTCN PAM
agggccaggccauuuccgcu

SEQ ID NO: 4943 - RNA, 20 nt, Artificial Sequence
  targeting sequence with TTCN PAM
gcuggcgcaggacucugcua

SEQ ID NO: 4944 - RNA, 20 nt, Artificial Sequence
  targeting sequence with TTCN PAM
ggcagguugcugcuagcaga

SEQ ID NO: 4945 - RNA, 20 nt, Artificial Sequence
  targeting sequence with TTCN PAM
uuuggccuggcugagaguuu

SEQ ID NO: 4946 - RNA, 20 nt, Artificial Sequence
  targeting sequence with TTCN PAM
gagaccugcgcuggagcgga

SEQ ID NO: 4947 - RNA, 20 nt, Artificial Sequence
  targeting sequence with TTCN PAM
uuccuugcuuccuuucuucc

SEQ ID NO: 4948 - RNA, 20 nt, Artificial Sequence
  targeting sequence with TTCN PAM
uugcuuccuuucuuccucuc

SEQ ID NO: 4949 - RNA, 20 nt, Artificial Sequence
  targeting sequence with TTCN PAM
uuucuuccucucucccuucu

SEQ ID NO: 4950 - RNA, 20 nt, Artificial Sequence
  targeting sequence with TTCN PAM
uccucucucccuucuccauc

SEQ ID NO: 4951 - RNA, 20 nt, Artificial Sequence
  targeting sequence with TTCN PAM
ucucucccuucuccauccag

SEQ ID NO: 4952 - RNA, 20 nt, Artificial Sequence
  targeting sequence with TTCN PAM
ccauccagcaggcuggaccu

SEQ ID NO: 4953 - RNA, 20 nt, Artificial Sequence
  targeting sequence with TTCN PAM
ccuauacccuaaccuuuguc

SEQ ID NO: 4954 - RNA, 20 nt, Artificial Sequence
  targeting sequence with TTCN PAM
uggagaauccaaacugaucc

SEQ ID NO: 4955 - RNA, 20 nt, Artificial Sequence
  targeting sequence with TTCN PAM
ccaagaagcaggcacugggg

SEQ ID NO: 4956 - RNA, 20 nt, Artificial Sequence
  targeting sequence with TTCN PAM
cugagguugugacucgugug

SEQ ID NO: 4957 - RNA, 20 nt, Artificial Sequence
  targeting sequence with TTCN PAM
gccucacacgagucacaacc

SEQ ID NO: 4958 - RNA, 20 nt, Artificial Sequence
  targeting sequence with TTCN PAM
ccacuccacaagauaccagg

SEQ ID NO: 4959 - RNA, 20 nt, Artificial Sequence
  targeting sequence with TTCN PAM
ugucucuaaaaugagccggc

SEQ ID NO: 4960 - RNA, 20 nt, Artificial Sequence
  targeting sequence with TTCN PAM
ccuuugagucuuuaaaucuu

SEQ ID NO: 4961 - RNA, 20 nt, Artificial Sequence
  targeting sequence with TTCN PAM
ugcagacucggugagcugug

SEQ ID NO: 4962 - RNA, 20 nt, Artificial Sequence
  targeting sequence with TTCN PAM
cagcucaccgagucugcaag

SEQ ID NO: 4963 - RNA, 20 nt, Artificial Sequence
  targeting sequence with TTCN PAM
aaaaauaguaucaaagugua

SEQ ID NO: 4964 - RNA, 20 nt, Artificial Sequence
  targeting sequence with TTCN PAM
uauuauuguuagauauugau

SEQ ID NO: 4965 - RNA, 20 nt, Artificial Sequence
  targeting sequence with TTCN PAM
uaugaaggagcaggaugacu

SEQ ID NO: 4966 - RNA, 20 nt, Artificial Sequence
  targeting sequence with TTCN PAM
uaugaauaucaauaucuaac

SEQ ID NO: 4967 - RNA, 20 nt, Artificial Sequence
  targeting sequence with TTCN PAM
uggcaguagcauugccagcu

SEQ ID NO: 4968 - RNA, 20 nt, Artificial Sequence
  targeting sequence with TTCN PAM
uugucuaugaaauacauuau

SEQ ID NO: 4969 - RNA, 20 nt, Artificial Sequence
  targeting sequence with TTCN PAM
uagacaaggaaagggaggcc

SEQ ID NO: 4970 - RNA, 20 nt, Artificial Sequence
  targeting sequence with TTCN PAM
auaauguauuucauagacaa

SEQ ID NO: 4971 - RNA, 20 nt, Artificial Sequence
  targeting sequence with TTCN PAM
cucguuuaaccuccaaaaaa

SEQ ID NO: 4972 - RNA, 20 nt, Artificial Sequence
  targeting sequence with TTCN PAM
ccagugccugggaugugcuc

SEQ ID NO: 4973 - RNA, 20 nt, Artificial Sequence
  targeting sequence with TTCN PAM
guguguuaacuauaagguug

SEQ ID NO: 4974 - RNA, 20 nt, Artificial Sequence
  targeting sequence with TTCN PAM
cuccucucccacaaaugucg

SEQ ID NO: 4975 - RNA, 20 nt, Artificial Sequence
  targeting sequence with TTCN PAM
aaggcgacauuugugggaga

SEQ ID NO: 4976 - RNA, 20 nt, Artificial Sequence
  targeting sequence with TTCN PAM
cgguggucacucuguaugcu

SEQ ID NO: 4977 - RNA, 20 nt, Artificial Sequence
  targeting sequence with TTCN PAM
agaaugugcccgaggaggac

SEQ ID NO: 4978 - RNA, 20 nt, Artificial Sequence
  targeting sequence with TTCN PAM
cgaagucggugaccaugacc

SEQ ID NO: 4979 - RNA, 20 nt, Artificial Sequence
  targeting sequence with TTCN PAM
acagacagguaagcacggcc

SEQ ID NO: 4980 - RNA, 20 nt, Artificial Sequence
  targeting sequence with TTCN PAM
cacaacugauggcagggagg

SEQ ID NO: 4981 - RNA, 20 nt, Artificial Sequence
  targeting sequence with TTCN PAM
uccauccagccaccugcuga

SEQ ID NO: 4982 - RNA, 20 nt, Artificial Sequence
  targeting sequence with TTCN PAM
caugugguccuuguguucgu

SEQ ID NO: 4983 - RNA, 20 nt, Artificial Sequence
  targeting sequence with TTCN PAM
ucgagcaggccagcaagugu

SEQ ID NO: 4984 - RNA, 20 nt, Artificial Sequence
  targeting sequence with TTCN PAM
cuuggcaguugagcacgcgc

SEQ ID NO: 4985 - RNA, 20 nt, Artificial Sequence
  targeting sequence with TTCN PAM
ugguuaggagacauuagcuc

SEQ ID NO: 4986 - RNA, 20 nt, Artificial Sequence
  targeting sequence with TTCN PAM
cuggcucugcggcagaggcu

SEQ ID NO: 4987 - RNA, 20 nt, Artificial Sequence
  targeting sequence with TTCN PAM
caguggccacgagugcagau

SEQ ID NO: 4988 - RNA, 20 nt, Artificial Sequence
  targeting sequence with TTCN PAM
ucugcacucguggccacugg

SEQ ID NO: 4989 - RNA, 20 nt, Artificial Sequence
  targeting sequence with TTCN PAM
ucaucugcacucguggccac

SEQ ID NO: 4990 - RNA, 20 nt, Artificial Sequence
  targeting sequence with TTCN PAM
gccuugacccugggucaaug

SEQ ID NO: 4991 - RNA, 20 nt, Artificial Sequence
  targeting sequence with TTCN PAM
acaguuccacacugcucccc

SEQ ID NO: 4992 - RNA, 20 nt, Artificial Sequence
  targeting sequence with TTCN PAM
acacugcuccccuuuuaaaa

SEQ ID NO: 4993 - RNA, 20 nt, Artificial Sequence
  targeting sequence with TTCN PAM
auguggagggacucgaggug

SEQ ID NO: 4994 - RNA, 20 nt, Artificial Sequence
  targeting sequence with TTCN PAM
aucuucugcuugcauaccuc

SEQ ID NO: 4995 - RNA, 20 nt, Artificial Sequence
  targeting sequence with TTCN PAM
gcuugcauaccucugagacc

SEQ ID NO: 4996 - RNA, 20 nt, Artificial Sequence
  targeting sequence with TTCN PAM
uccaccacaucugccuggcc

SEQ ID NO: 4997 - RNA, 20 nt, Artificial Sequence
  targeting sequence with TTCN PAM
agacugugacuacauuuagu

SEQ ID NO: 4998 - RNA, 20 nt, Artificial Sequence
  targeting sequence with TTCN PAM
uaggggggccgcugggugga

SEQ ID NO: 4999 - RNA, 20 nt, Artificial Sequence
  targeting sequence with TTCN PAM
caacuggacuucauaggggg

SEQ ID NO: 5000 - RNA, 20 nt, Artificial Sequence
  targeting sequence with TTCN PAM
cuguccaccggcccccagag

SEQ ID NO: 5001 - RNA, 20 nt, Artificial Sequence
  targeting sequence with TTCN PAM
cucccuuacugacuuccuuc

SEQ ID NO: 5002 - RNA, 20 nt, Artificial Sequence
  targeting sequence with TTCN PAM
uucuguggccagacauugag

SEQ ID NO: 5003 - RNA, 20 nt, Artificial Sequence
  targeting sequence with TTCN PAM
guggccagacauugagcaag

SEQ ID NO: 5004 - RNA, 20 nt, Artificial Sequence
  targeting sequence with TTCN PAM
ucaacuauuuagcagcuacg

SEQ ID NO: 5005 - RNA, 20 nt, Artificial Sequence
  targeting sequence with TTCN PAM
ccagcuugagcugugcgacc

SEQ ID NO: 5006 - RNA, 20 nt, Artificial Sequence
  targeting sequence with TTCN PAM
cagcgaguuccccagcuuga

SEQ ID NO: 5007 - RNA, 20 nt, Artificial Sequence
  targeting sequence with TTCN PAM
acuguaagccccagccccca

SEQ ID NO: 5008 - RNA, 20 nt, Artificial Sequence
  targeting sequence with TTCN PAM
aaggcugagaaggcccagga

SEQ ID NO: 5009 - RNA, 20 nt, Artificial Sequence
  targeting sequence with TTCN PAM
cagccuuugaaacaggcuag

SEQ ID NO: 5010 - RNA, 20 nt, Artificial Sequence
  targeting sequence with TTCN PAM
gcccugagacuuuccuacag

SEQ ID NO: 5011 - RNA, 20 nt, Artificial Sequence
  targeting sequence with TTCN PAM
uacagaguacagguuuugau

SEQ ID NO: 5012 - RNA, 20 nt, Artificial Sequence
  targeting sequence with TTCN PAM
guuuuaaaggcaagaaucaa

SEQ ID NO: 5013 - RNA, 20 nt, Artificial Sequence
  targeting sequence with TTCN PAM
ugccuuuaaaacugaacauc

SEQ ID NO: 5014 - RNA, 20 nt, Artificial Sequence
  targeting sequence with TTCN PAM
gccccaucaggugaccccuu

SEQ ID NO: 5015 - RNA, 20 nt, Artificial Sequence
  targeting sequence with TTCN PAM
ugaaggucaguguguggagg

SEQ ID NO: 5016 - RNA, 20 nt, Artificial Sequence
  targeting sequence with TTCN PAM
ggaacugaccugacugagcc

SEQ ID NO: 5017 - RNA, 20 nt, Artificial Sequence
  targeting sequence with TTCN PAM
uucccagaaaggccuucccc

SEQ ID NO: 5018 - RNA, 20 nt, Artificial Sequence
  targeting sequence with TTCN PAM
cagaaaggccuuccccaggc

SEQ ID NO: 5019 - RNA, 20 nt, Artificial Sequence
  targeting sequence with TTCN PAM
gggaaagaacagccuccccu

SEQ ID NO: 5020 - RNA, 20 nt, Artificial Sequence
  targeting sequence with TTCN PAM
ccaggccuggugcucuggcc

SEQ ID NO: 5021 - RNA, 20 nt, Artificial Sequence
  targeting sequence with TTCN PAM
uggagaagucccuucuuugg

SEQ ID NO: 5022 - RNA, 20 nt, Artificial Sequence
  targeting sequence with TTCN PAM
ccaggaaguccuccagaggc

SEQ ID NO: 5023 - RNA, 20 nt, Artificial Sequence
  targeting sequence with TTCN PAM
uuggggucccagucagugua

SEQ ID NO: 5024 - RNA, 20 nt, Artificial Sequence
  targeting sequence with TTCN PAM
cauacacugacugggacccc

SEQ ID NO: 5025 - RNA, 20 nt, Artificial Sequence
  targeting sequence with TTCN PAM
uugccacugccauuuccucc

SEQ ID NO: 5026 - RNA, 20 nt, Artificial Sequence
  targeting sequence with TTCN PAM
uccucuguaagcaggugauu

SEQ ID NO: 5027 - RNA, 20 nt, Artificial Sequence
  targeting sequence with TTCN PAM
agaccagccuguucaacaug

SEQ ID NO: 5028 - RNA, 20 nt, Artificial Sequence
  targeting sequence with TTCN PAM
acauggugaaaccccgucuc

SEQ ID NO: 5029 - RNA, 20 nt, Artificial Sequence
  targeting sequence with TTCN PAM
ccauguugaacaggcugguc

SEQ ID NO: 5030 - RNA, 20 nt, Artificial Sequence
  targeting sequence with TTCN PAM
ccugccuuagccucccaagu

SEQ ID NO: 5031 - RNA, 20 nt, Artificial Sequence
  targeting sequence with TTCN PAM
agcgauucuccugccuuagc

SEQ ID NO: 5032 - RNA, 20 nt, Artificial Sequence
  targeting sequence with TTCN PAM
aucucaaaaauaaauaagua

SEQ ID NO: 5033 - RNA, 20 nt, Artificial Sequence
  targeting sequence with TTCN PAM
ucaccuccacacucagugcc

SEQ ID NO: 5034 - RNA, 20 nt, Artificial Sequence
  targeting sequence with TTCN PAM
ccuccacacucagugccacu

SEQ ID NO: 5035 - RNA, 20 nt, Artificial Sequence
  targeting sequence with TTCN PAM
agcuccauccuuggccacgg

SEQ ID NO: 5036 - RNA, 20 nt, Artificial Sequence
  targeting sequence with TTCN PAM
ggauccuggccucuaagaug

SEQ ID NO: 5037 - RNA, 20 nt, Artificial Sequence
  targeting sequence with TTCN PAM
ccccugucaaaugaggugug

SEQ ID NO: 5038 - RNA, 20 nt, Artificial Sequence
  targeting sequence with TTCN PAM
agguccccuugcacaucagg

SEQ ID NO: 5039 - RNA, 20 nt, Artificial Sequence
  targeting sequence with TTCN PAM
aacccucugccagccuguga

SEQ ID NO: 5040 - RNA, 20 nt, Artificial Sequence
  targeting sequence with TTCN PAM
ccguguuagcaaggaugguc

SEQ ID NO: 5041 - RNA, 20 nt, Artificial Sequence
  targeting sequence with TTCN PAM
ccugccucagccuccugagu

SEQ ID NO: 5042 - RNA, 20 nt, Artificial Sequence
  targeting sequence with TTCN PAM
cgccauucuccugccucagc

SEQ ID NO: 5043 - RNA, 20 nt, Artificial Sequence
  targeting sequence with TTCN PAM
agacggagucucgcucuauu

SEQ ID NO: 5044 - RNA, 20 nt, Artificial Sequence
  targeting sequence with TTCN PAM
uuccagacggagucucgcuc

SEQ ID NO: 5045 - RNA, 20 nt, Artificial Sequence
  targeting sequence with TTCN PAM
ggccucaguggcacuccacu

SEQ ID NO: 5046 - RNA, 20 nt, Artificial Sequence
  targeting sequence with TTCN PAM
uucuggccucaguggcacuc

SEQ ID NO: 5047 - RNA, 20 nt, Artificial Sequence
  targeting sequence with TTCN PAM
uuagacaauccugggagcaa

SEQ ID NO: 5048 - RNA, 20 nt, Artificial Sequence
  targeting sequence with TTCN PAM
cagagggcggggccacacag

SEQ ID NO: 5049 - RNA, 20 nt, Artificial Sequence
  targeting sequence with TTCN PAM
aguuuguguggguccaacac

SEQ ID NO: 5050 - RNA, 20 nt, Artificial Sequence
  targeting sequence with TTCN PAM
cccgccacucucugaggccu

SEQ ID NO: 5051 - RNA, 20 nt, Artificial Sequence
  targeting sequence with TTCN PAM
ccacccaacuucccccgcca

SEQ ID NO: 5052 - RNA, 20 nt, Artificial Sequence
  targeting sequence with TTCN PAM
cauuccucugaggcucaucc

SEQ ID NO: 5053 - RNA, 20 nt, Artificial Sequence
  targeting sequence with TTCN PAM
ucugaggcucauccucuugg

SEQ ID NO: 5054 - RNA, 20 nt, Artificial Sequence
  targeting sequence with TTCN PAM
uggaaagggauaauaagguu

SEQ ID NO: 5055 - RNA, 20 nt, Artificial Sequence
  targeting sequence with TTCN PAM
augaaagagaggcaccaaga

SEQ ID NO: 5056 - RNA, 20 nt, Artificial Sequence
  targeting sequence with TTCN PAM
uauauucagacgcuuagaca

SEQ ID NO: 5057 - RNA, 20 nt, Artificial Sequence
  targeting sequence with TTCN PAM
gacgcuuagacagagccagg

SEQ ID NO: 5058 - RNA, 20 nt, Artificial Sequence
  targeting sequence with TTCN PAM
cugugccuggcucugucuaa

SEQ ID NO: 5059 - RNA, 20 nt, Artificial Sequence
  targeting sequence with TTCN PAM
aguuuguauuggucaagguu

SEQ ID NO: 5060 - RNA, 20 nt, Artificial Sequence
  targeting sequence with TTCN PAM
gcagagaagcagaaccagua

SEQ ID NO: 5061 - RNA, 20 nt, Artificial Sequence
  targeting sequence with TTCN PAM
cugcagaaccuugaccaaua

SEQ ID NO: 5062 - RNA, 20 nt, Artificial Sequence
  targeting sequence with TTCN PAM
gcuucucugcagaaccuuga

SEQ ID NO: 5063 - RNA, 20 nt, Artificial Sequence
  targeting sequence with TTCN PAM
agcucaugugaccgugcggg

SEQ ID NO: 5064 - RNA, 20 nt, Artificial Sequence
  targeting sequence with TTCN PAM
gacuugccagcccgcacggu

SEQ ID NO: 5065 - RNA, 20 nt, Artificial Sequence
  targeting sequence with TTCN PAM
ugcagaauuugauguugcaa

SEQ ID NO: 5066 - RNA, 20 nt, Artificial Sequence
  targeting sequence with TTCN PAM
gcaggaauugccagccugcc

SEQ ID NO: 5067 - RNA, 20 nt, Artificial Sequence
  targeting sequence with TTCN PAM
gccccaggacugccuuagga

SEQ ID NO: 5068 - RNA, 20 nt, Artificial Sequence
  targeting sequence with TTCN PAM
uucuucccugggaggccuca

SEQ ID NO: 5069 - RNA, 20 nt, Artificial Sequence
  targeting sequence with TTCN PAM
ucccugggaggccucagucu

SEQ ID NO: 5070 - RNA, 20 nt, Artificial Sequence
  targeting sequence with TTCN PAM
cugggaggccucagucuguu

SEQ ID NO: 5071 - RNA, 20 nt, Artificial Sequence
  targeting sequence with TTCN PAM
cuuaaggccuucaacugauu

SEQ ID NO: 5072 - RNA, 20 nt, Artificial Sequence
  targeting sequence with TTCN PAM
acugauuaaaugaggccugc

SEQ ID NO: 5073 - RNA, 20 nt, Artificial Sequence
  targeting sequence with TTCN PAM
gauuuaaauguuagucacau

SEQ ID NO: 5074 - RNA, 20 nt, Artificial Sequence
  targeting sequence with TTCN PAM
cagcagcauuuccacuggcu

SEQ ID NO: 5075 - RNA, 20 nt, Artificial Sequence
  targeting sequence with TTCN PAM
acuggcuuuugaccaaacau

SEQ ID NO: 5076 - RNA, 20 nt, Artificial Sequence
  targeting sequence with TTCN PAM
cagccccucccuuacaggca

SEQ ID NO: 5077 - RNA, 20 nt, Artificial Sequence
  targeting sequence with TTCN PAM
ucccaggccuggaguuuauu

SEQ ID NO: 5078 - RNA, 20 nt, Artificial Sequence
  targeting sequence with TTCN PAM
gaaaagccagcugguccagc

SEQ ID NO: 5079 - RNA, 20 nt, Artificial Sequence
  targeting sequence with TTCN PAM
gaauaaacuccaggccuggg

SEQ ID NO: 5080 - RNA, 20 nt, Artificial Sequence
  targeting sequence with TTCN PAM
gggacgaugccugccucuac

SEQ ID NO: 5081 - RNA, 20 nt, Artificial Sequence
  targeting sequence with TTCN PAM
uguggcacgugggcuucuug

SEQ ID NO: 5082 - RNA, 20 nt, Artificial Sequence
  targeting sequence with TTCN PAM
uguggcacguuccuggaggc

SEQ ID NO: 5083 - RNA, 20 nt, Artificial Sequence
  targeting sequence with TTCN PAM
uggaggccgaacccuucugg

SEQ ID NO: 5084 - RNA, 20 nt, Artificial Sequence
  targeting sequence with TTCN PAM
gccuccaggaacgugccaca

SEQ ID NO: 5085 - RNA, 20 nt, Artificial Sequence
  targeting sequence with TTCN PAM
ggcuuuggaaggagucguca

SEQ ID NO: 5086 - RNA, 20 nt, Artificial Sequence
  targeting sequence with TTCN PAM
aaagccagaaggguucggcc

SEQ ID NO: 5087 - RNA, 20 nt, Artificial Sequence
  targeting sequence with TTCN PAM
uccccagccucccgcauggc

SEQ ID NO: 5088 - RNA, 20 nt, Artificial Sequence
  targeting sequence with TTCN PAM
agccccuuccuccccagccu

SEQ ID NO: 5089 - RNA, 20 nt, Artificial Sequence
  targeting sequence with TTCN PAM
gacucugcgaugauggaggu

SEQ ID NO: 5090 - RNA, 20 nt, Artificial Sequence
  targeting sequence with TTCN PAM
ggagggagaguggccaggac

SEQ ID NO: 5091 - RNA, 20 nt, Artificial Sequence
  targeting sequence with TTCN PAM
gguacccgcccccuccccau

SEQ ID NO: 5092 - RNA, 20 nt, Artificial Sequence
  targeting sequence with TTCN PAM
cauuagccuugcucaaguug

SEQ ID NO: 5093 - RNA, 20 nt, Artificial Sequence
  targeting sequence with TTCN PAM
ucgggugagaggucugagcc

SEQ ID NO: 5094 - RNA, 20 nt, Artificial Sequence
  targeting sequence with TTCN PAM
ccuagauacccgcagugucc

SEQ ID NO: 5095 - RNA, 20 nt, Artificial Sequence
  targeting sequence with TTCN PAM
uuccccuagauacccgcagu

SEQ ID NO: 5096 - RNA, 20 nt, Artificial Sequence
  targeting sequence with TTCN PAM
acuucaagucuggaacuuca

SEQ ID NO: 5097 - RNA, 20 nt, Artificial Sequence
  targeting sequence with TTCN PAM
agucuggaacuucaagucug

SEQ ID NO: 5098 - RNA, 20 nt, Artificial Sequence
  targeting sequence with TTCN PAM
agacuugaaguggaacaaga

SEQ ID NO: 5099 - RNA, 20 nt, Artificial Sequence
  targeting sequence with TTCN PAM
agucugugugugugcgugcg

SEQ ID NO: 5100 - RNA, 20 nt, Artificial Sequence
  targeting sequence with TTCN PAM
cuggcggccgaauuuaaagg

SEQ ID NO: 5101 - RNA, 20 nt, Artificial Sequence
  targeting sequence with TTCN PAM
gccgccagggaagccuugau

SEQ ID NO: 5102 - RNA, 20 nt, Artificial Sequence
  targeting sequence with TTCN PAM
ccccguggcacuuagaacca

SEQ ID NO: 5103 - RNA, 20 nt, Artificial Sequence
  targeting sequence with TTCN PAM
aagugccacggggggaaacu

SEQ ID NO: 5104 - RNA, 20 nt, Artificial Sequence
  targeting sequence with TTCN PAM
guguaucaagugguucuaag

SEQ ID NO: 5105 - RNA, 20 nt, Artificial Sequence
  targeting sequence with TTCN PAM
uaucucccccacuaggaugu

SEQ ID NO: 5106 - RNA, 20 nt, Artificial Sequence
  targeting sequence with TTCN PAM
caaugccccuguggaguuua

SEQ ID NO: 5107 - RNA, 20 nt, Artificial Sequence
  targeting sequence with TTCN PAM
gccugggcagucagauuuuc

SEQ ID NO: 5108 - RNA, 20 nt, Artificial Sequence
  targeting sequence with TTCN PAM
uuaggaggggacauuugagu

SEQ ID NO: 5109 - RNA, 20 nt, Artificial Sequence
  targeting sequence with TTCN PAM
cugccacccaccuccucacc

SEQ ID NO: 5110 - RNA, 20 nt, Artificial Sequence
  targeting sequence with TTCN PAM
aggucaucacaguuggggcc

SEQ ID NO: 5111 - RNA, 20 nt, Artificial Sequence
  targeting sequence with TTCN PAM
ucucuggucccccugcacag

SEQ ID NO: 5112 - RNA, 20 nt, Artificial Sequence
  targeting sequence with TTCN PAM
aggacacucagucugaugag

SEQ ID NO: 5113 - RNA, 20 nt, Artificial Sequence
  targeting sequence with TTCN PAM
ucugugcacucgccucccuc

SEQ ID NO: 5114 - RNA, 20 nt, Artificial Sequence
  targeting sequence with TTCN PAM
cugacccucgggcugggcag

SEQ ID NO: 5115 - RNA, 20 nt, Artificial Sequence
  targeting sequence with TTCN PAM
uccaucaagcucccgaucaa

SEQ ID NO: 5116 - RNA, 20 nt, Artificial Sequence
  targeting sequence with TTCN PAM
ccuggccgauaagacagcaa

SEQ ID NO: 5117 - RNA, 20 nt, Artificial Sequence
  targeting sequence with TTCN PAM
agaagagagcuuagugucug

SEQ ID NO: 5118 - RNA, 20 nt, Artificial Sequence
  targeting sequence with TTCN PAM
cgaagguaagccgccugcag

SEQ ID NO: 5119 - RNA, 20 nt, Artificial Sequence
  targeting sequence with TTCN PAM
ccauucaccccugcaccagg

SEQ ID NO: 5120 - RNA, 20 nt, Artificial Sequence
  targeting sequence with TTCN PAM
ccccugcaccaggcauugca

SEQ ID NO: 5121 - RNA, 20 nt, Artificial Sequence
  targeting sequence with TTCN PAM
cugccaaagaugucaucaau

SEQ ID NO: 5122 - RNA, 20 nt, Artificial Sequence
  targeting sequence with TTCN PAM
cugaggaccagcggguacug

SEQ ID NO: 5123 - RNA, 20 nt, Artificial Sequence
  targeting sequence with TTCN PAM
cccuugucuguguaaggagg

SEQ ID NO: 5124 - RNA, 20 nt, Artificial Sequence
  targeting sequence with TTCN PAM
cauuuaauccuauuuaaggu

SEQ ID NO: 5125 - RNA, 20 nt, Artificial Sequence
  targeting sequence with TTCN PAM
gagccccauucucauuuaau

SEQ ID NO: 5126 - RNA, 20 nt, Artificial Sequence
  targeting sequence with TTCN PAM
uaacguguuuuuauagagac

SEQ ID NO: 5127 - RNA, 20 nt, Artificial Sequence
  targeting sequence with TTCN PAM
uuaagcccuccucucuccua

SEQ ID NO: 5128 - RNA, 20 nt, Artificial Sequence
  targeting sequence with TTCN PAM
ugguaggagagaggagggcu

SEQ ID NO: 5129 - RNA, 20 nt, Artificial Sequence
  targeting sequence with TTCN PAM
guggagguccccucacuccc

SEQ ID NO: 5130 - RNA, 20 nt, Artificial Sequence
  targeting sequence with TTCN PAM
ccaggagugggaagcggcgg

SEQ ID NO: 5131 - RNA, 20 nt, Artificial Sequence
  targeting sequence with TTCN PAM
cacuccuggagaaacuggag

SEQ ID NO: 5132 - RNA, 20 nt, Artificial Sequence
  targeting sequence with TTCN PAM
ugugugugugugugugugug

SEQ ID NO: 5133 - RNA, 20 nt, Artificial Sequence
  targeting sequence with TTCN PAM
guaagcuuacagggcuggcc

SEQ ID NO: 5134 - RNA, 20 nt, Artificial Sequence
  targeting sequence with TTCN PAM
cgcggcugggggcugcugga

SEQ ID NO: 5135 - RNA, 20 nt, Artificial Sequence
  targeting sequence with TTCN PAM
cgcuguggcucucuccagca

SEQ ID NO: 5136 - RNA, 20 nt, Artificial Sequence
  targeting sequence with TTCN PAM
uagaggcugcaggacagugc

SEQ ID NO: 5137 - RNA, 20 nt, Artificial Sequence
  targeting sequence with TTCN PAM
augcucaccugggugugagc

SEQ ID NO: 5138 - RNA, 20 nt, Artificial Sequence
  targeting sequence with TTCN PAM
gggagcugagaaaucucaaa

SEQ ID NO: 5139 - RNA, 20 nt, Artificial Sequence
  targeting sequence with TTCN PAM
cagcucccagaaccauggag

SEQ ID NO: 5140 - RNA, 20 nt, Artificial Sequence
  targeting sequence with TTCN PAM
acuuuuuugcugguuugaga

SEQ ID NO: 5141 - RNA, 20 nt, Artificial Sequence
  targeting sequence with TTCN PAM
accaaaaugcugcaaccaga

SEQ ID NO: 5142 - RNA, 20 nt, Artificial Sequence
  targeting sequence with TTCN PAM
ggcuugaggagauggggucu

SEQ ID NO: 5143 - RNA, 20 nt, Artificial Sequence
  targeting sequence with TTCN PAM
cucuaucuccauuuugaaac

SEQ ID NO: 5144 - RNA, 20 nt, Artificial Sequence
  targeting sequence with TTCN PAM
aaauggagauagagagaaau

SEQ ID NO: 5145 - RNA, 20 nt, Artificial Sequence
  targeting sequence with TTCN PAM
aaacacagagugguuucaaa

SEQ ID NO: 5146 - RNA, 20 nt, Artificial Sequence
  targeting sequence with TTCN PAM
uccaaacacagagugguuuc

SEQ ID NO: 5147 - RNA, 20 nt, Artificial Sequence
  targeting sequence with TTCN PAM
gagcugcccacuggcagaac

SEQ ID NO: 5148 - RNA, 20 nt, Artificial Sequence
  targeting sequence with TTCN PAM
gccagugggcagcucugaau

SEQ ID NO: 5149 - RNA, 20 nt, Artificial Sequence
  targeting sequence with TTCN PAM
uugggcaggagugagcuccu

SEQ ID NO: 5150 - RNA, 20 nt, Artificial Sequence
  targeting sequence with TTCN PAM
ggggacaaggagcucacucc

SEQ ID NO: 5151 - RNA, 20 nt, Artificial Sequence
  targeting sequence with TTCN PAM
guguuuucaaagcccauucu

SEQ ID NO: 5152 - RNA, 20 nt, Artificial Sequence
  targeting sequence with TTCN PAM
aagcccauucuaaagcagau

SEQ ID NO: 5153 - RNA, 20 nt, Artificial Sequence
  targeting sequence with TTCN PAM
aaagcagauucccauuuccg

SEQ ID NO: 5154 - RNA, 20 nt, Artificial Sequence
  targeting sequence with TTCN PAM
cauuuccgucuuugacucua

SEQ ID NO: 5155 - RNA, 20 nt, Artificial Sequence
  targeting sequence with TTCN PAM
gucuuugacucuaaggccca

SEQ ID NO: 5156 - RNA, 20 nt, Artificial Sequence
  targeting sequence with TTCN PAM
ccuuaugcacccacugcccg

SEQ ID NO: 5157 - RNA, 20 nt, Artificial Sequence
  targeting sequence with TTCN PAM
auacucugguucugccacuu

SEQ ID NO: 5158 - RNA, 20 nt, Artificial Sequence
  targeting sequence with TTCN PAM
gccacuuccaugcccuuuga

SEQ ID NO: 5159 - RNA, 20 nt, Artificial Sequence
  targeting sequence with TTCN PAM
augcccuuugagccugggca

SEQ ID NO: 5160 - RNA, 20 nt, Artificial Sequence
  targeting sequence with TTCN PAM
ccucaucucagcuuccuccu

SEQ ID NO: 5161 - RNA, 20 nt, Artificial Sequence
  targeting sequence with TTCN PAM
uccuccauaagagggaaaaa

SEQ ID NO: 5162 - RNA, 20 nt, Artificial Sequence
  targeting sequence with TTCN PAM
cucuuauggaggaggaagcu

SEQ ID NO: 5163 - RNA, 20 nt, Artificial Sequence
  targeting sequence with TTCN PAM
gccccagccgggggccucuc

SEQ ID NO: 5164 - RNA, 20 nt, Artificial Sequence
  targeting sequence with TTCN PAM
aaccgaggucugcccuccuu

SEQ ID NO: 5165 - RNA, 20 nt, Artificial Sequence
  targeting sequence with TTCN PAM
cccugccgcucuauagcugu

SEQ ID NO: 5166 - RNA, 20 nt, Artificial Sequence
  targeting sequence with TTCN PAM
ucauacagagauguuaagua

SEQ ID NO: 5167 - RNA, 20 nt, Artificial Sequence
  targeting sequence with TTCN PAM
agcuaucguuacuauuguuu

SEQ ID NO: 5168 - RNA, 20 nt, Artificial Sequence
  targeting sequence with TTCN PAM
ucacccguugcuuuaaaauc

SEQ ID NO: 5169 - RNA, 20 nt, Artificial Sequence
  targeting sequence with TTCN PAM
acacaggguagcccgucaau

SEQ ID NO: 5170 - RNA, 20 nt, Artificial Sequence
  targeting sequence with TTCN PAM
ugcuaccugccugggcaugu

SEQ ID NO: 5171 - RNA, 20 nt, Artificial Sequence
  targeting sequence with TTCN PAM
gguuggguggagcaugagag

SEQ ID NO: 5172 - RNA, 20 nt, Artificial Sequence
  targeting sequence with TTCN PAM
cagaccucucaugcuccacc

SEQ ID NO: 5173 - RNA, 20 nt, Artificial Sequence
  targeting sequence with TTCN PAM
aggcuggagucccacugucu

SEQ ID NO: 5174 - RNA, 20 nt, Artificial Sequence
  targeting sequence with TTCN PAM
cgucugagcacguccagggg

SEQ ID NO: 5175 - RNA, 20 nt, Artificial Sequence
  targeting sequence with TTCN PAM
ccuggacgugcucagacgag

SEQ ID NO: 5176 - RNA, 20 nt, Artificial Sequence
  targeting sequence with TTCN PAM
caaacccucagugguucccc

SEQ ID NO: 5177 - RNA, 20 nt, Artificial Sequence
  targeting sequence with TTCN PAM
cacccucacucuccuguucc

SEQ ID NO: 5178 - RNA, 20 nt, Artificial Sequence
  targeting sequence with TTCN PAM
gggcacagcaggcuggcaug

SEQ ID NO: 5179 - RNA, 20 nt, Artificial Sequence
  targeting sequence with TTCN PAM
ggaaagaugagcauagucag

SEQ ID NO: 5180 - RNA, 20 nt, Artificial Sequence
  targeting sequence with TTCN PAM
ugaacauccauccuacaugc

SEQ ID NO: 5181 - RNA, 20 nt, Artificial Sequence
  targeting sequence with TTCN PAM
gggguccuggcuuggaggga

SEQ ID NO: 5182 - RNA, 20 nt, Artificial Sequence
  targeting sequence with TTCN PAM
cuccaagccaggaccccuga

SEQ ID NO: 5183 - RNA, 20 nt, Artificial Sequence
  targeting sequence with TTCN PAM
aaaggggagcgugauuagag

SEQ ID NO: 5184 - RNA, 20 nt, Artificial Sequence
  targeting sequence with TTCN PAM
aacugacaugugccugugag

SEQ ID NO: 5185 - RNA, 20 nt, Artificial Sequence
  targeting sequence with TTCN PAM
augacuucaaacugacaugu

SEQ ID NO: 5186 - RNA, 20 nt, Artificial Sequence
  targeting sequence with TTCN PAM
uggagucagauuccaugacu

SEQ ID NO: 5187 - RNA, 20 nt, Artificial Sequence
  targeting sequence with TTCN PAM
cuuagcugcaaaauggugcu

SEQ ID NO: 5188 - RNA, 20 nt, Artificial Sequence
  targeting sequence with TTCN PAM
cuauguccuagcugcaaggg

SEQ ID NO: 5189 - RNA, 20 nt, Artificial Sequence
  targeting sequence with TTCN PAM
gagcacaugccaggcuccau

SEQ ID NO: 5190 - RNA, 20 nt, Artificial Sequence
  targeting sequence with TTCN PAM
cacgugucaucuucacagug

SEQ ID NO: 5191 - RNA, 20 nt, Artificial Sequence
  targeting sequence with TTCN PAM
cagugucccugugaguaggu

SEQ ID NO: 5192 - RNA, 20 nt, Artificial Sequence
  targeting sequence with TTCN PAM
cuuuccaucuuacaaaugag

SEQ ID NO: 5193 - RNA, 20 nt, Artificial Sequence
  targeting sequence with TTCN PAM
aucuuacaaaugaguaaaca

SEQ ID NO: 5194 - RNA, 20 nt, Artificial Sequence
  targeting sequence with TTCN PAM
uagccaaugggugugucuga

SEQ ID NO: 5195 - RNA, 20 nt, Artificial Sequence
  targeting sequence with TTCN PAM
gaggugguucagacagaccc

SEQ ID NO: 5196 - RNA, 20 nt, Artificial Sequence
  targeting sequence with TTCN PAM
gacagaccccggcuuacccu

SEQ ID NO: 5197 - RNA, 20 nt, Artificial Sequence
  targeting sequence with TTCN PAM
aggguaagccggggucuguc

SEQ ID NO: 5198 - RNA, 20 nt, Artificial Sequence
  targeting sequence with TTCN PAM
gccugcuggcugcauaggga

SEQ ID NO: 5199 - RNA, 20 nt, Artificial Sequence
  targeting sequence with TTCN PAM
acccagagauggagacagug

SEQ ID NO: 5200 - RNA, 20 nt, Artificial Sequence
  targeting sequence with TTCN PAM
cugagaaacuaaggcucaga

SEQ ID NO: 5201 - RNA, 20 nt, Artificial Sequence
  targeting sequence with TTCN PAM
cagggaaaacaccaucuuuc

SEQ ID NO: 5202 - RNA, 20 nt, Artificial Sequence
  targeting sequence with TTCN PAM
accucucugagccuuaguuu

SEQ ID NO: 5203 - RNA, 20 nt, Artificial Sequence
  targeting sequence with TTCN PAM
caacucugcagcugaccagc

SEQ ID NO: 5204 - RNA, 20 nt, Artificial Sequence
  targeting sequence with TTCN PAM
uugaguuguuucuagguuuc

SEQ ID NO: 5205 - RNA, 20 nt, Artificial Sequence
  targeting sequence with TTCN PAM
agguuuccuagcucuugccu

SEQ ID NO: 5206 - RNA, 20 nt, Artificial Sequence
  targeting sequence with TTCN PAM
uagcucuugccucagaccuu

SEQ ID NO: 5207 - RNA, 20 nt, Artificial Sequence
  targeting sequence with TTCN PAM
caucugagcuggcuuuccuc

SEQ ID NO: 5208 - RNA, 20 nt, Artificial Sequence
  targeting sequence with TTCN PAM
ucugccccaggcugcagcuc

SEQ ID NO: 5209 - RNA, 20 nt, Artificial Sequence
  targeting sequence with TTCN PAM
ugcugccaugccccaggucu

SEQ ID NO: 5210 - RNA, 20 nt, Artificial Sequence
  targeting sequence with TTCN PAM
agaccuggggcauggcagca

SEQ ID NO: 5211 - RNA, 20 nt, Artificial Sequence
  targeting sequence with TTCN PAM
augcuccuugacuuugcauu

SEQ ID NO: 5212 - RNA, 20 nt, Artificial Sequence
  targeting sequence with TTCN PAM
ccugcuccugaggggccggg

SEQ ID NO: 5213 - RNA, 20 nt, Artificial Sequence
  targeting sequence with TTCN PAM
gugucaguuugugccaccac

SEQ ID NO: 5214 - RNA, 20 nt, Artificial Sequence
  targeting sequence with TTCN PAM
gccauuguguggacagcaug

SEQ ID NO: 5215 - RNA, 20 nt, Artificial Sequence
  targeting sequence with TTCN PAM
acuccaaguggaguggggua

SEQ ID NO: 5216 - RNA, 20 nt, Artificial Sequence
  targeting sequence with TTCN PAM
uuaugccauauuuaugcaca

SEQ ID NO: 5217 - RNA, 20 nt, Artificial Sequence
  targeting sequence with TTCN PAM
gagauggggucuugcugugu

SEQ ID NO: 5218 - RNA, 20 nt, Artificial Sequence
  targeting sequence with TTCN PAM
ugggcucaagcaauccucug

SEQ ID NO: 5219 - RNA, 20 nt, Artificial Sequence
  targeting sequence with TTCN PAM
gcaugcagcucaggcacccc

SEQ ID NO: 5220 - RNA, 20 nt, Artificial Sequence
  targeting sequence with TTCN PAM
ugccuugcuggucaugcuaa

SEQ ID NO: 5221 - RNA, 20 nt, Artificial Sequence
  targeting sequence with TTCN PAM
agggcuuggcacaugccuug

SEQ ID NO: 5222 - RNA, 20 nt, Artificial Sequence
  targeting sequence with TTCN PAM
agaaaccugaguguauaacu

SEQ ID NO: 5223 - RNA, 20 nt, Artificial Sequence
  targeting sequence with TTCN PAM
agaaggcccggcugucacau

SEQ ID NO: 5224 - RNA, 20 nt, Artificial Sequence
  targeting sequence with TTCN PAM
uuuaagaguggacuccuuag

SEQ ID NO: 5225 - RNA, 20 nt, Artificial Sequence
  targeting sequence with TTCN PAM
ggucuggauggugcauuccu

SEQ ID NO: 5226 - RNA, 20 nt, Artificial Sequence
  targeting sequence with TTCN PAM
ucgagagcaaaagacagucu

SEQ ID NO: 5227 - RNA, 20 nt, Artificial Sequence
  targeting sequence with TTCN PAM
aggugcucuuccuggcacug

SEQ ID NO: 5228 - RNA, 20 nt, Artificial Sequence
  targeting sequence with TTCN PAM
uggcacuggggagggauaca

SEQ ID NO: 5229 - RNA, 20 nt, Artificial Sequence
  targeting sequence with TTCN PAM
cccuccuggagcaucuauuu

SEQ ID NO: 5230 - RNA, 20 nt, Artificial Sequence
  targeting sequence with TTCN PAM
uccacuaaaauagaugcucc

SEQ ID NO: 5231 - RNA, 20 nt, Artificial Sequence
  targeting sequence with TTCN PAM
gucuuccuccacuaaaauag

SEQ ID NO: 5232 - RNA, 20 nt, Artificial Sequence
  targeting sequence with TTCN PAM
guacucuauauuaaugguuu

SEQ ID NO: 5233 - RNA, 20 nt, Artificial Sequence
  targeting sequence with TTCN PAM
ccaucgcaucuuuucaguac

SEQ ID NO: 5234 - RNA, 20 nt, Artificial Sequence
  targeting sequence with TTCN PAM
uugcuauaguuuucuccauc

SEQ ID NO: 5235 - RNA, 20 nt, Artificial Sequence
  targeting sequence with TTCN PAM
cuuccuugcuauaguuuucu

SEQ ID NO: 5236 - RNA, 20 nt, Artificial Sequence
  targeting sequence with TTCN PAM
uccaccuugucagcgagacc

SEQ ID NO: 5237 - RNA, 20 nt, Artificial Sequence
  targeting sequence with TTCN PAM
cugccucauggccuguuucg

SEQ ID NO: 5238 - RNA, 20 nt, Artificial Sequence
  targeting sequence with TTCN PAM
aggcaaagcaaaggccccca

SEQ ID NO: 5239 - RNA, 20 nt, Artificial Sequence
  targeting sequence with TTCN PAM
ugguacucccugcacauccc

SEQ ID NO: 5240 - RNA, 20 nt, Artificial Sequence
  targeting sequence with TTCN PAM
caccucucugguuuccuggu

SEQ ID NO: 5241 - RNA, 20 nt, Artificial Sequence
  targeting sequence with TTCN PAM
gauccaggccagaccacacu

SEQ ID NO: 5242 - RNA, 20 nt, Artificial Sequence
  targeting sequence with TTCN PAM
cagcucagcagcuaggccac

SEQ ID NO: 5243 - RNA, 20 nt, Artificial Sequence
  targeting sequence with TTCN PAM
gcccaagguccuugucaucu

SEQ ID NO: 5244 - RNA, 20 nt, Artificial Sequence
  targeting sequence with TTCN PAM
gacuccagccugagccccgc

SEQ ID NO: 5245 - RNA, 20 nt, Artificial Sequence
  targeting sequence with TTCN PAM
gagggaugaguuuggcacug

SEQ ID NO: 5246 - RNA, 20 nt, Artificial Sequence
  targeting sequence with TTCN PAM
ugccugguuugagggccgug

SEQ ID NO: 5247 - RNA, 20 nt, Artificial Sequence
  targeting sequence with TTCN PAM
gcaccauggcugaccaaaca

SEQ ID NO: 5248 - RNA, 20 nt, Artificial Sequence
  targeting sequence with TTCN PAM
gugaggccaaagugcagacg

SEQ ID NO: 5249 - RNA, 20 nt, Artificial Sequence
  targeting sequence with TTCN PAM
cccuccgacauccuucugug

SEQ ID NO: 5250 - RNA, 20 nt, Artificial Sequence
  targeting sequence with TTCN PAM
uuucucccuccgacauccuu

SEQ ID NO: 5251 - RNA, 20 nt, Artificial Sequence
  targeting sequence with TTCN PAM
uuuccucgggcucuggcagg

SEQ ID NO: 5252 - RNA, 20 nt, Artificial Sequence
  targeting sequence with TTCN PAM
ucgggcucuggcaggugacc

SEQ ID NO: 5253 - RNA, 20 nt, Artificial Sequence
  targeting sequence with TTCN PAM
cuggugcugccuguagugcu

SEQ ID NO: 5254 - RNA, 20 nt, Artificial Sequence
  targeting sequence with TTCN PAM
gacuugucccucucucagcc

SEQ ID NO: 5255 - RNA, 20 nt, Artificial Sequence
  targeting sequence with TTCN PAM
gccuuuccggggcugcuggc

SEQ ID NO: 5256 - RNA, 20 nt, Artificial Sequence
  targeting sequence with TTCN PAM
ggggcugcuggccuggcccu

SEQ ID NO: 5257 - RNA, 20 nt, Artificial Sequence
  targeting sequence with TTCN PAM
aggcaaggaggcugccccac

SEQ ID NO: 5258 - RNA, 20 nt, Artificial Sequence
  targeting sequence with TTCN PAM
uggcaccuccaccuggggag

SEQ ID NO: 5259 - RNA, 20 nt, Artificial Sequence
  targeting sequence with TTCN PAM
ccauucaaacaggucgagcu

SEQ ID NO: 5260 - RNA, 20 nt, Artificial Sequence
  targeting sequence with TTCN PAM
aacaggucgagcugugcucg

SEQ ID NO: 5261 - RNA, 20 nt, Artificial Sequence
  targeting sequence with TTCN PAM
gcccacggacaucggcacau

SEQ ID NO: 5262 - RNA, 20 nt, Artificial Sequence
  targeting sequence with TTCN PAM
gugccaggcauucaauccuc

SEQ ID NO: 5263 - RNA, 20 nt, Artificial Sequence
  targeting sequence with TTCN PAM
auccucaggucuccaccaag

SEQ ID NO: 5264 - RNA, 20 nt, Artificial Sequence
  targeting sequence with TTCN PAM
ucccauggauaggggagggg

SEQ ID NO: 5265 - RNA, 20 nt, Artificial Sequence
  targeting sequence with TTCN PAM
cauggauaggggagggggcg

SEQ ID NO: 5266 - RNA, 20 nt, Artificial Sequence
  targeting sequence with TTCN PAM
cacucaccccccaacgaugu

SEQ ID NO: 5267 - RNA, 20 nt, Artificial Sequence
  targeting sequence with TTCN PAM
ccacaguuagcuggagauga

SEQ ID NO: 5268 - RNA, 20 nt, Artificial Sequence
  targeting sequence with TTCN PAM
ggauggcaucuagccagagg

SEQ ID NO: 5269 - RNA, 20 nt, Artificial Sequence
  targeting sequence with TTCN PAM
ugagccaccuuuacucugcu

SEQ ID NO: 5270 - RNA, 20 nt, Artificial Sequence
  targeting sequence with TTCN PAM
caccccuacuucacagagga

SEQ ID NO: 5271 - RNA, 20 nt, Artificial Sequence
  targeting sequence with TTCN PAM
cagaggaagaaaccuggaac

SEQ ID NO: 5272 - RNA, 20 nt, Artificial Sequence
  targeting sequence with TTCN PAM
ucugugaaguaggggugcga

SEQ ID NO: 5273 - RNA, 20 nt, Artificial Sequence
  targeting sequence with TTCN PAM
uccucugugaaguaggggug

SEQ ID NO: 5274 - RNA, 20 nt, Artificial Sequence
  targeting sequence with TTCN PAM
agguuucuuccucugugaag

SEQ ID NO: 5275 - RNA, 20 nt, Artificial Sequence
  targeting sequence with TTCN PAM
ugcugugugagcuuggcagg

SEQ ID NO: 5276 - RNA, 20 nt, Artificial Sequence
  targeting sequence with TTCN PAM
ggcucaguuccugcugugug

SEQ ID NO: 5277 - RNA, 20 nt, Artificial Sequence
  targeting sequence with TTCN PAM
gagccagcccaaucugcguu

SEQ ID NO: 5278 - RNA, 20 nt, Artificial Sequence
  targeting sequence with TTCN PAM
uacuucacccggcugggcuc

SEQ ID NO: 5279 - RNA, 20 nt, Artificial Sequence
  targeting sequence with TTCN PAM
cccggcugggcuccucauuu

SEQ ID NO: 5280 - RNA, 20 nt, Artificial Sequence
  targeting sequence with TTCN PAM
cagccucacuguuacccgua

SEQ ID NO: 5281 - RNA, 20 nt, Artificial Sequence
  targeting sequence with TTCN PAM
ccuucccagccucacuguua

SEQ ID NO: 5282 - RNA, 20 nt, Artificial Sequence
  targeting sequence with TTCN PAM
uggucuguguuccccuuccc

SEQ ID NO: 5283 - RNA, 20 nt, Artificial Sequence
  targeting sequence with TTCN PAM
gccaucacucaccgagcuuc

SEQ ID NO: 5284 - RNA, 20 nt, Artificial Sequence
  targeting sequence with TTCN PAM
augccugcaggcaucguucu

SEQ ID NO: 5285 - RNA, 20 nt, Artificial Sequence
  targeting sequence with TTCN PAM
guuaucacccaggccugauu

SEQ ID NO: 5286 - RNA, 20 nt, Artificial Sequence
  targeting sequence with TTCN PAM
cuggccuggcggagaugcuu

SEQ ID NO: 5287 - RNA, 20 nt, Artificial Sequence
  targeting sequence with TTCN PAM
aaggcauggucgggggagag

SEQ ID NO: 5288 - RNA, 20 nt, Artificial Sequence
  targeting sequence with TTCN PAM
agaccuguuuugcuuuugua

SEQ ID NO: 5289 - RNA, 20 nt, Artificial Sequence
  targeting sequence with TTCN PAM
aguuacaaaagcaaaacagg

SEQ ID NO: 5290 - RNA, 20 nt, Artificial Sequence
  targeting sequence with TTCN PAM
ggguuuuguagcauuuuuau

SEQ ID NO: 5291 - RNA, 20 nt, Artificial Sequence
  targeting sequence with TTCN PAM
uaguauaagcaaggcaucac

SEQ ID NO: 5292 - RNA, 20 nt, Artificial Sequence
  targeting sequence with TTCN PAM
acaaacuuacccaguuccua

SEQ ID NO: 5293 - RNA, 20 nt, Artificial Sequence
  targeting sequence with TTCN PAM
caucaccaguacuugcccaa

SEQ ID NO: 5294 - RNA, 20 nt, Artificial Sequence
  targeting sequence with TTCN PAM
uaggauaggcacaaggagua

SEQ ID NO: 5295 - RNA, 20 nt, Artificial Sequence
  targeting sequence with TTCN PAM
uuccuaggauaggcacaagg

SEQ ID NO: 5296 - RNA, 20 nt, Artificial Sequence
  targeting sequence with TTCN PAM
uuucauuccuaggauaggca

SEQ ID NO: 5297 - RNA, 20 nt, Artificial Sequence
  targeting sequence with TTCN PAM
ugcagcuccccugaccaccc

SEQ ID NO: 5298 - RNA, 20 nt, Artificial Sequence
  targeting sequence with TTCN PAM
uucuuuucuccccaguaccu

SEQ ID NO: 5299 - RNA, 20 nt, Artificial Sequence
  targeting sequence with TTCN PAM
uuucuccccaguaccuggca

SEQ ID NO: 5300 - RNA, 20 nt, Artificial Sequence
  targeting sequence with TTCN PAM
ccccaguaccuggcacacag

SEQ ID NO: 5301 - RNA, 20 nt, Artificial Sequence
  targeting sequence with TTCN PAM
guaaauacucgggccaggcu

SEQ ID NO: 5302 - RNA, 20 nt, Artificial Sequence
  targeting sequence with TTCN PAM
guaaugagccagugcuaagu

SEQ ID NO: 5303 - RNA, 20 nt, Artificial Sequence
  targeting sequence with TTCN PAM
ugauuuaaaauucagaacag

SEQ ID NO: 5304 - RNA, 20 nt, Artificial Sequence
  targeting sequence with TTCN PAM
gaacagucucagauugggug

SEQ ID NO: 5305 - RNA, 20 nt, Artificial Sequence
  targeting sequence with TTCN PAM
gaauuuuaaaucaugaaaaa

SEQ ID NO: 5306 - RNA, 20 nt, Artificial Sequence
  targeting sequence with TTCN PAM
uaaacacaagcaauccuccu

SEQ ID NO: 5307 - RNA, 20 nt, Artificial Sequence
  targeting sequence with TTCN PAM
agacccugggcaacagugag

SEQ ID NO: 5308 - RNA, 20 nt, Artificial Sequence
  targeting sequence with TTCN PAM
augugggaccuccaggcccu

SEQ ID NO: 5309 - RNA, 20 nt, Artificial Sequence
  targeting sequence with TTCN PAM
ccagccuuagaguggagggc

SEQ ID NO: 5310 - RNA, 20 nt, Artificial Sequence
  targeting sequence with TTCN PAM
cucucucucuagacagccca

SEQ ID NO: 5311 - RNA, 20 nt, Artificial Sequence
  targeting sequence with TTCN PAM
uuaugacaugggcugucuag

SEQ ID NO: 5312 - RNA, 20 nt, Artificial Sequence
  targeting sequence with TTCN PAM
ucccagauuacauuuucuga

SEQ ID NO: 5313 - RNA, 20 nt, Artificial Sequence
  targeting sequence with TTCN PAM
gacaauucagugucauauau

SEQ ID NO: 5314 - RNA, 20 nt, Artificial Sequence
  targeting sequence with TTCN PAM
gugucauauauggaaagcau

SEQ ID NO: 5315 - RNA, 20 nt, Artificial Sequence
  targeting sequence with TTCN PAM
auauaugacacugaauuguc

SEQ ID NO: 5316 - RNA, 20 nt, Artificial Sequence
  targeting sequence with TTCN PAM
agaguugacagauggcaaug

SEQ ID NO: 5317 - RNA, 20 nt, Artificial Sequence
  targeting sequence with TTCN PAM
agccauugccaucugucaac

SEQ ID NO: 5318 - RNA, 20 nt, Artificial Sequence
  targeting sequence with TTCN PAM
aacgggcagagauaacacag

SEQ ID NO: 5319 - RNA, 20 nt, Artificial Sequence
  targeting sequence with TTCN PAM
ccuccacagaaucaaguauc

SEQ ID NO: 5320 - RNA, 20 nt, Artificial Sequence
  targeting sequence with TTCN PAM
guggaggggaaggagagaga

SEQ ID NO: 5321 - RNA, 20 nt, Artificial Sequence
  targeting sequence with TTCN PAM
aacaucacagagcugucagg

SEQ ID NO: 5322 - RNA, 20 nt, Artificial Sequence
  targeting sequence with TTCN PAM
ugcagaggguuagcaggugg

SEQ ID NO: 5323 - RNA, 20 nt, Artificial Sequence
  targeting sequence with TTCN PAM
uccccgaucccuggugacca

SEQ ID NO: 5324 - RNA, 20 nt, Artificial Sequence
  targeting sequence with TTCN PAM
ugcaagccacaccccuuccu

SEQ ID NO: 5325 - RNA, 20 nt, Artificial Sequence
  targeting sequence with TTCN PAM
ccuuccugcaagccacaccc

SEQ ID NO: 5326 - RNA, 20 nt, Artificial Sequence
  targeting sequence with TTCN PAM
cuauuugcuaguccagauuu

SEQ ID NO: 5327 - RNA, 20 nt, Artificial Sequence
  targeting sequence with TTCN PAM
uaguggccagcguugcucac

SEQ ID NO: 5328 - RNA, 20 nt, Artificial Sequence
  targeting sequence with TTCN PAM
ugcuagaucccacaggucuc

SEQ ID NO: 5329 - RNA, 20 nt, Artificial Sequence
  targeting sequence with TTCN PAM
ucuccaccaaagcuuuuggc

SEQ ID NO: 5330 - RNA, 20 nt, Artificial Sequence
  targeting sequence with TTCN PAM
gcauccuccucuaagcuuug

SEQ ID NO: 5331 - RNA, 20 nt, Artificial Sequence
  targeting sequence with TTCN PAM
ucugcaaagcuuagaggagg

SEQ ID NO: 5332 - RNA, 20 nt, Artificial Sequence
  targeting sequence with TTCN PAM
ggauucaucugcaaagcuua

SEQ ID NO: 5333 - RNA, 20 nt, Artificial Sequence
  targeting sequence with TTCN PAM
cuggaggggcugaccauuuc

SEQ ID NO: 5334 - RNA, 20 nt, Artificial Sequence
  targeting sequence with TTCN PAM
uuucucuggaggggcugacc

SEQ ID NO: 5335 - RNA, 20 nt, Artificial Sequence
  targeting sequence with TTCN PAM
ucuuaguacuuuacacuaau

SEQ ID NO: 5336 - RNA, 20 nt, Artificial Sequence
  targeting sequence with TTCN PAM
cccgcccacuacggcugugu

SEQ ID NO: 5337 - RNA, 20 nt, Artificial Sequence
  targeting sequence with TTCN PAM
gauauaugaagaauggcggc

SEQ ID NO: 5338 - RNA, 20 nt, Artificial Sequence
  targeting sequence with TTCN PAM
uauaucagaacacagccgua

SEQ ID NO: 5339 - RNA, 20 nt, Artificial Sequence
  targeting sequence with TTCN PAM
ucauauaucagaacacagcc

SEQ ID NO: 5340 - RNA, 20 nt, Artificial Sequence
  targeting sequence with TTCN PAM
aaaacagaguuggagucuug

SEQ ID NO: 5341 - RNA, 20 nt, Artificial Sequence
  targeting sequence with TTCN PAM
aagaguauaaaauaaauuuu

SEQ ID NO: 5342 - RNA, 20 nt, Artificial Sequence
  targeting sequence with TTCN PAM
uagcuucuaagaguauaaaa

SEQ ID NO: 5343 - RNA, 20 nt, Artificial Sequence
  targeting sequence with TTCN PAM
uguguggcaaaguucuuagc

SEQ ID NO: 5344 - RNA, 20 nt, Artificial Sequence
  targeting sequence with TTCN PAM
aaauuugguucauguguggc

SEQ ID NO: 5345 - RNA, 20 nt, Artificial Sequence
  targeting sequence with TTCN PAM
ucccuaguguaucuacuucc

SEQ ID NO: 5346 - RNA, 20 nt, Artificial Sequence
  targeting sequence with TTCN PAM
cuaguguaucuacuuccuuu

SEQ ID NO: 5347 - RNA, 20 nt, Artificial Sequence
  targeting sequence with TTCN PAM
uuuugaaauuuuauaaacaa

SEQ ID NO: 5348 - RNA, 20 nt, Artificial Sequence
  targeting sequence with TTCN PAM
aaaggaaguagauacacuag

SEQ ID NO: 5349 - RNA, 20 nt, Artificial Sequence
  targeting sequence with TTCN PAM
ucugcuaccucuuguguaua

SEQ ID NO: 5350 - RNA, 20 nt, Artificial Sequence
  targeting sequence with TTCN PAM
agucugcuuguuccaagcuc

SEQ ID NO: 5351 - RNA, 20 nt, Artificial Sequence
  targeting sequence with TTCN PAM
aagcucagaagguaacugca

SEQ ID NO: 5352 - RNA, 20 nt, Artificial Sequence
  targeting sequence with TTCN PAM
gagcuuggaacaagcagacu

SEQ ID NO: 5353 - RNA, 20 nt, Artificial Sequence
  targeting sequence with TTCN PAM
cugcuaacaucgaggugugu

SEQ ID NO: 5354 - RNA, 20 nt, Artificial Sequence
  targeting sequence with TTCN PAM
uaaaacugacuguaguuguc

SEQ ID NO: 5355 - RNA, 20 nt, Artificial Sequence
  targeting sequence with TTCN PAM
ccuggaguccucacacgguc

SEQ ID NO: 5356 - RNA, 20 nt, Artificial Sequence
  targeting sequence with TTCN PAM
uucccaggaugccuucaacg

SEQ ID NO: 5357 - RNA, 20 nt, Artificial Sequence
  targeting sequence with TTCN PAM
caggaugccuucaacgggca

SEQ ID NO: 5358 - RNA, 20 nt, Artificial Sequence
  targeting sequence with TTCN PAM
acgggcagaaucggccaucu

SEQ ID NO: 5359 - RNA, 20 nt, Artificial Sequence
  targeting sequence with TTCN PAM
gcccguugaaggcauccugg

SEQ ID NO: 5360 - RNA, 20 nt, Artificial Sequence
  targeting sequence with TTCN PAM
ugagaacacacagcauuauu

SEQ ID NO: 5361 - RNA, 20 nt, Artificial Sequence
  targeting sequence with TTCN PAM
caagaagcucccuuagugag

SEQ ID NO: 5362 - RNA, 20 nt, Artificial Sequence
  targeting sequence with TTCN PAM
ugcucuguuugcagaccauu

SEQ ID NO: 5363 - RNA, 20 nt, Artificial Sequence
  targeting sequence with TTCN PAM
aaauggucugcaaacagagc

SEQ ID NO: 5364 - RNA, 20 nt, Artificial Sequence
  targeting sequence with TTCN PAM
uccaaaaaauuggcaguaaa

SEQ ID NO: 5365 - RNA, 20 nt, Artificial Sequence
  targeting sequence with TTCN PAM
aagguaagccugucauaacu

SEQ ID NO: 5366 - RNA, 20 nt, Artificial Sequence
  targeting sequence with TTCN PAM
uugacuguagcugucagcaa

SEQ ID NO: 5367 - RNA, 20 nt, Artificial Sequence
  targeting sequence with TTCN PAM
cuuugcugguaaccacuuga

SEQ ID NO: 5368 - RNA, 20 nt, Artificial Sequence
  targeting sequence with TTCN PAM
gaucauguugcuuauauugu

SEQ ID NO: 5369 - RNA, 20 nt, Artificial Sequence
  targeting sequence with TTCN PAM
ucaggaucguccaccgugua

SEQ ID NO: 5370 - RNA, 20 nt, Artificial Sequence
  targeting sequence with TTCN PAM
gcaccccuagcaccugccgu

SEQ ID NO: 5371 - RNA, 20 nt, Artificial Sequence
  targeting sequence with TTCN PAM
auaggaaauaaggggacuag

SEQ ID NO: 5372 - RNA, 20 nt, Artificial Sequence
  targeting sequence with TTCN PAM
uauggaaacaacgccuuccg

SEQ ID NO: 5373 - RNA, 20 nt, Artificial Sequence
  targeting sequence with TTCN PAM
aguccccuuauuuccuaugg

SEQ ID NO: 5374 - RNA, 20 nt, Artificial Sequence
  targeting sequence with TTCN PAM
cuccugauuuugggcuccug

SEQ ID NO: 5375 - RNA, 20 nt, Artificial Sequence
  targeting sequence with TTCN PAM
aggucaugucccacacaauc

SEQ ID NO: 5376 - RNA, 20 nt, Artificial Sequence
  targeting sequence with TTCN PAM
cuccgcccacauccucacca

SEQ ID NO: 5377 - RNA, 20 nt, Artificial Sequence
  targeting sequence with TTCN PAM
caccuucucuccgcccacau

SEQ ID NO: 5378 - RNA, 20 nt, Artificial Sequence
  targeting sequence with TTCN PAM
ccuacccuauucucaccuuc

SEQ ID NO: 5379 - RNA, 20 nt, Artificial Sequence
  targeting sequence with TTCN PAM
uguccuacuguuuccccuac

SEQ ID NO: 5380 - RNA, 20 nt, Artificial Sequence
  targeting sequence with TTCN PAM
cguacucaaaaccaauggua

SEQ ID NO: 5381 - RNA, 20 nt, Artificial Sequence
  targeting sequence with TTCN PAM
accauugguuuugaguacgu

SEQ ID NO: 5382 - RNA, 20 nt, Artificial Sequence
  targeting sequence with TTCN PAM
aacugcaagaccauuggaac

SEQ ID NO: 5383 - RNA, 20 nt, Artificial Sequence
  targeting sequence with TTCN PAM
aauggucuugcaguuugaaa

SEQ ID NO: 5384 - RNA, 20 nt, Artificial Sequence
  targeting sequence with TTCN PAM
gacgguuccaauggucuugc

SEQ ID NO: 5385 - RNA, 20 nt, Artificial Sequence
  targeting sequence with TTCN PAM
cuaaggguacaguucugcuc

SEQ ID NO: 5386 - RNA, 20 nt, Artificial Sequence
  targeting sequence with TTCN PAM
gcucuuaagugcuggcccuu

SEQ ID NO: 5387 - RNA, 20 nt, Artificial Sequence
  targeting sequence with TTCN PAM
aucuucucaguguguuugac

SEQ ID NO: 5388 - RNA, 20 nt, Artificial Sequence
  targeting sequence with TTCN PAM
caguguguuugacaaaggcc

SEQ ID NO: 5389 - RNA, 20 nt, Artificial Sequence
  targeting sequence with TTCN PAM
gugacuugcuggagguuggc

SEQ ID NO: 5390 - RNA, 20 nt, Artificial Sequence
  targeting sequence with TTCN PAM
uuguuauucugugacuugcu

SEQ ID NO: 5391 - RNA, 20 nt, Artificial Sequence
  targeting sequence with TTCN PAM
gugcugucagacuucauugu

SEQ ID NO: 5392 - RNA, 20 nt, Artificial Sequence
  targeting sequence with TTCN PAM
cuggcagugaggguuucugu

SEQ ID NO: 5393 - RNA, 20 nt, Artificial Sequence
  targeting sequence with TTCN PAM
uucucuggcagugaggguuu

SEQ ID NO: 5394 - RNA, 20 nt, Artificial Sequence
  targeting sequence with TTCN PAM
gggcuggcugcgccucugug

SEQ ID NO: 5395 - RNA, 20 nt, Artificial Sequence
  targeting sequence with TTCN PAM
cugucagauuugccaaguca

SEQ ID NO: 5396 - RNA, 20 nt, Artificial Sequence
  targeting sequence with TTCN PAM
uaaggcucccuaguucugug

SEQ ID NO: 5397 - RNA, 20 nt, Artificial Sequence
  targeting sequence with TTCN PAM
gugcauggugagaugaaaau

SEQ ID NO: 5398 - RNA, 20 nt, Artificial Sequence
  targeting sequence with TTCN PAM
ucucaccaugcacagaacua

SEQ ID NO: 5399 - RNA, 20 nt, Artificial Sequence
  targeting sequence with TTCN PAM
gcccuguuuugccuuuaguu

SEQ ID NO: 5400 - RNA, 20 nt, Artificial Sequence
  targeting sequence with TTCN PAM
aaauacaaaauguacaaaau

SEQ ID NO: 5401 - RNA, 20 nt, Artificial Sequence
  targeting sequence with TTCN PAM
uauauauuuuguacauuuug

SEQ ID NO: 5402 - RNA, 20 nt, Artificial Sequence
  targeting sequence with TTCN PAM
cucauuuauaccagcucccu

SEQ ID NO: 5403 - RNA, 20 nt, Artificial Sequence
  targeting sequence with TTCN PAM
aaaguauagcaccauucacu

SEQ ID NO: 5404 - RNA, 20 nt, Artificial Sequence
  targeting sequence with TTCN PAM
auugcuuuauauuuauuucu

SEQ ID NO: 5405 - RNA, 20 nt, Artificial Sequence
  targeting sequence with TTCN PAM
gggaaaauaaaucuuaaacc

SEQ ID NO: 5406 - RNA, 20 nt, Artificial Sequence
  targeting sequence with TTCN PAM
cagaaauaaauauaaagcaa

SEQ ID NO: 5407 - RNA, 20 nt, Artificial Sequence
  targeting sequence with TTCN PAM
guguuaauuagucauguuga

SEQ ID NO: 5408 - RNA, 20 nt, Artificial Sequence
  targeting sequence with TTCN PAM
ccucaacaugacuaauuaac

SEQ ID NO: 5409 - RNA, 20 nt, Artificial Sequence
  targeting sequence with TTCN PAM
caaauuccuucucugcauua

SEQ ID NO: 5410 - RNA, 20 nt, Artificial Sequence
  targeting sequence with TTCN PAM
uucucugcauuacaauaacu

SEQ ID NO: 5411 - RNA, 20 nt, Artificial Sequence
  targeting sequence with TTCN PAM
cugcauuacaauaacuauga

SEQ ID NO: 5412 - RNA, 20 nt, Artificial Sequence
  targeting sequence with TTCN PAM
uaguuauuguaaugcagaga

SEQ ID NO: 5413 - RNA, 20 nt, Artificial Sequence
  targeting sequence with TTCN PAM
uauacaaccaauaccaaggg

SEQ ID NO: 5414 - RNA, 20 nt, Artificial Sequence
  targeting sequence with TTCN PAM
guaauuauguuuuaagcaaa

SEQ ID NO: 5415 - RNA, 20 nt, Artificial Sequence
  targeting sequence with TTCN PAM
auaugucuccaagcauuaaa

SEQ ID NO: 5416 - RNA, 20 nt, Artificial Sequence
  targeting sequence with TTCN PAM
gugaaguuaaacucaguaaa

SEQ ID NO: 5417 - RNA, 20 nt, Artificial Sequence
  targeting sequence with TTCN PAM
cagaauuaucuuuuuaaugc

SEQ ID NO: 5418 - RNA, 20 nt, Artificial Sequence
  targeting sequence with TTCN PAM
ccaaacagauuuuaaaaaca

SEQ ID NO: 5419 - RNA, 20 nt, Artificial Sequence
  targeting sequence with TTCN PAM
uuaaguaauugaugucaaau

SEQ ID NO: 5420 - RNA, 20 nt, Artificial Sequence
  targeting sequence with TTCN PAM
ggagaacacagcauuuucaa

SEQ ID NO: 5421 - RNA, 20 nt, Artificial Sequence
  targeting sequence with TTCN PAM
ccagaaguacagggugcauu

SEQ ID NO: 5422 - RNA, 20 nt, Artificial Sequence
  targeting sequence with TTCN PAM
aaauugcucuuuucaaucua

SEQ ID NO: 5423 - RNA, 20 nt, Artificial Sequence
  targeting sequence with TTCN PAM
aucuaauuauaucagaaaaa

SEQ ID NO: 5424 - RNA, 20 nt, Artificial Sequence
  targeting sequence with TTCN PAM
gauauaauuagauugaaaag

SEQ ID NO: 5425 - RNA, 20 nt, Artificial Sequence
  targeting sequence with TTCN PAM
agagcuuaguauuucccaau

SEQ ID NO: 5426 - RNA, 20 nt, Artificial Sequence
  targeting sequence with TTCN PAM
caauuuuugauccugauccu

SEQ ID NO: 5427 - RNA, 20 nt, Artificial Sequence
  targeting sequence with TTCN PAM
ucaagauccaagcuuaugca

SEQ ID NO: 5428 - RNA, 20 nt, Artificial Sequence
  targeting sequence with TTCN PAM
caucuagacccaucugaaau

SEQ ID NO: 5429 - RNA, 20 nt, Artificial Sequence
  targeting sequence with TTCN PAM
gaugggucuagaugagaacc

SEQ ID NO: 5430 - RNA, 20 nt, Artificial Sequence
  targeting sequence with TTCN PAM
auacaaauagggagacauau

SEQ ID NO: 5431 - RNA, 20 nt, Artificial Sequence
  targeting sequence with TTCN PAM
uuguaaaauaguaauuaagu

SEQ ID NO: 5432 - RNA, 20 nt, Artificial Sequence
  targeting sequence with TTCN PAM
uuuucauuguaaaauaguaa

SEQ ID NO: 5433 - RNA, 20 nt, Artificial Sequence
  targeting sequence with TTCN PAM
uguuuaauauuacugcaaga

SEQ ID NO: 5434 - RNA, 20 nt, Artificial Sequence
  targeting sequence with TTCN PAM
uaaaauauaaaaaccaaagg

SEQ ID NO: 5435 - RNA, 20 nt, Artificial Sequence
  targeting sequence with TTCN PAM
uuugguuuuuauauuuuaag

SEQ ID NO: 5436 - RNA, 20 nt, Artificial Sequence
  targeting sequence with TTCN PAM
uuuguagcaucguagagaaa

SEQ ID NO: 5437 - RNA, 20 nt, Artificial Sequence
  targeting sequence with TTCN PAM
cuacgaugcuacaaaagaaa

SEQ ID NO: 5438 - RNA, 20 nt, Artificial Sequence
  targeting sequence with TTCN PAM
uguaacaaaaaagucugcca

SEQ ID NO: 5439 - RNA, 20 nt, Artificial Sequence
  targeting sequence with TTCN PAM
gaaaaucuccacagaaaugu

SEQ ID NO: 5440 - RNA, 20 nt, Artificial Sequence
  targeting sequence with TTCN PAM
gaaauagagccaguggcaga

SEQ ID NO: 5441 - RNA, 20 nt, Artificial Sequence
  targeting sequence with TTCN PAM
guggagauuuucggaaauag

SEQ ID NO: 5442 - RNA, 20 nt, Artificial Sequence
  targeting sequence with TTCN PAM
cauuucuguggagauuuucg

SEQ ID NO: 5443 - RNA, 20 nt, Artificial Sequence
  targeting sequence with TTCN PAM
cccacugccaaacagcuccc

SEQ ID NO: 5444 - RNA, 20 nt, Artificial Sequence
  targeting sequence with TTCN PAM
aguggcuuaaaaaugcuuuc

SEQ ID NO: 5445 - RNA, 20 nt, Artificial Sequence
  targeting sequence with TTCN PAM
uugagaaauacacgauccgc

SEQ ID NO: 5446 - RNA, 20 nt, Artificial Sequence
  targeting sequence with TTCN PAM
caaggaaagcauuuuuaagc

SEQ ID NO: 5447 - RNA, 20 nt, Artificial Sequence
  targeting sequence with TTCN PAM
caguccaaucuccaggcucu

SEQ ID NO: 5448 - RNA, 20 nt, Artificial Sequence
  targeting sequence with TTCN PAM
aaaggguucgagauucugau

SEQ ID NO: 5449 - RNA, 20 nt, Artificial Sequence
  targeting sequence with TTCN PAM
agauucugauuccaagaagg

SEQ ID NO: 5450 - RNA, 20 nt, Artificial Sequence
  targeting sequence with TTCN PAM
gauuccaagaaggugcugag

SEQ ID NO: 5451 - RNA, 20 nt, Artificial Sequence
  targeting sequence with TTCN PAM
aagaaggugcugagcaucca

SEQ ID NO: 5452 - RNA, 20 nt, Artificial Sequence
  targeting sequence with TTCN PAM
uggaaucagaaucucgaacc

SEQ ID NO: 5453 - RNA, 20 nt, Artificial Sequence
  targeting sequence with TTCN PAM
ucuagggaucaacaucauca

SEQ ID NO: 5454 - RNA, 20 nt, Artificial Sequence
  targeting sequence with TTCN PAM
caacucaccaaucaucaugg

SEQ ID NO: 5455 - RNA, 20 nt, Artificial Sequence
  targeting sequence with TTCN PAM
gaacccugcagaaaagaaaa

SEQ ID NO: 5456 - RNA, 20 nt, Artificial Sequence
  targeting sequence with TTCN PAM
gaaucucccaugaugauugg

SEQ ID NO: 5457 - RNA, 20 nt, Artificial Sequence
  targeting sequence with TTCN PAM
gcaggguucagaaucuccca

SEQ ID NO: 5458 - RNA, 20 nt, Artificial Sequence
  targeting sequence with TTCN PAM
uuucugcaggguucagaauc

SEQ ID NO: 5459 - RNA, 20 nt, Artificial Sequence
  targeting sequence with TTCN PAM
uuuucuuuucugcaggguuc

SEQ ID NO: 5460 - RNA, 20 nt, Artificial Sequence
  targeting sequence with TTCN PAM
uacgguuagagaaaagguuu

SEQ ID NO: 5461 - RNA, 20 nt, Artificial Sequence
  targeting sequence with TTCN PAM
cuaaccguaugaacuuuaac

SEQ ID NO: 5462 - RNA, 20 nt, Artificial Sequence
  targeting sequence with TTCN PAM
augcugacuuguguucugca

SEQ ID NO: 5463 - RNA, 20 nt, Artificial Sequence
  targeting sequence with TTCN PAM
gcaauuuaaacaugucuuca

SEQ ID NO: 5464 - RNA, 20 nt, Artificial Sequence
  targeting sequence with TTCN PAM
ucuggcaacuuaaugcaaug

SEQ ID NO: 5465 - RNA, 20 nt, Artificial Sequence
  targeting sequence with TTCN PAM
ugauuauguaaaacauguac

SEQ ID NO: 5466 - RNA, 20 nt, Artificial Sequence
  targeting sequence with TTCN PAM
augaucucauuuagucagug

SEQ ID NO: 5467 - RNA, 20 nt, Artificial Sequence
  targeting sequence with TTCN PAM
cugacuaaaugagaucauag

SEQ ID NO: 5468 - RNA, 20 nt, Artificial Sequence
  targeting sequence with TTCN PAM
cacaugggugcagaguagca

SEQ ID NO: 5469 - RNA, 20 nt, Artificial Sequence
  targeting sequence with TTCN PAM
cguugggcacugugugagcc

SEQ ID NO: 5470 - RNA, 20 nt, Artificial Sequence
  targeting sequence with TTCN PAM
gacccaggagugacccagag

SEQ ID NO: 5471 - RNA, 20 nt, Artificial Sequence
  targeting sequence with TTCN PAM
ccaaguguguaagccaaagg

SEQ ID NO: 5472 - RNA, 20 nt, Artificial Sequence
  targeting sequence with TTCN PAM
gaauacucaccgugugccau

SEQ ID NO: 5473 - RNA, 20 nt, Artificial Sequence
  targeting sequence with TTCN PAM
gaacgauucgccaagugugu

SEQ ID NO: 5474 - RNA, 20 nt, Artificial Sequence
  targeting sequence with TTCN PAM
accucagggccccccuacuc

SEQ ID NO: 5475 - RNA, 20 nt, Artificial Sequence
  targeting sequence with TTCN PAM
uuccaccucagggccccccu

SEQ ID NO: 5476 - RNA, 20 nt, Artificial Sequence
  targeting sequence with TTCN PAM
gaaaaugggccaggcacagu

SEQ ID NO: 5477 - RNA, 20 nt, Artificial Sequence
  targeting sequence with TTCN PAM
gaauuuuauuuaucaaaugu

SEQ ID NO: 5478 - RNA, 20 nt, Artificial Sequence
  targeting sequence with TTCN PAM
ccuugccucagccucccaag

SEQ ID NO: 5479 - RNA, 20 nt, Artificial Sequence
  targeting sequence with TTCN PAM
agcgauucuccuugccucag

SEQ ID NO: 5480 - RNA, 20 nt, Artificial Sequence
  targeting sequence with TTCN PAM
cccagguuccagcgauucuc

SEQ ID NO: 5481 - RNA, 20 nt, Artificial Sequence
  targeting sequence with TTCN PAM
gauuuuuuuuuuuuuuuuuu

SEQ ID NO: 5482 - RNA, 20 nt, Artificial Sequence
  targeting sequence with TTCN PAM
ggcuuuucuccucauacaaa

SEQ ID NO: 5483 - RNA, 20 nt, Artificial Sequence
  targeting sequence with TTCN PAM
ccucauacaaagccuuugaa

SEQ ID NO: 5484 - RNA, 20 nt, Artificial Sequence
  targeting sequence with TTCN PAM
aaggcuuuguaugaggagaa

SEQ ID NO: 5485 - RNA, 20 nt, Artificial Sequence
  targeting sequence with TTCN PAM
ugcacuaaaaccuuucaaag

SEQ ID NO: 5486 - RNA, 20 nt, Artificial Sequence
  targeting sequence with TTCN PAM
cucugguucaugcacuaaaa

SEQ ID NO: 5487 - RNA, 20 nt, Artificial Sequence
  targeting sequence with TTCN PAM
aagggagcuguccgggauga

SEQ ID NO: 5488 - RNA, 20 nt, Artificial Sequence
  targeting sequence with TTCN PAM
uuaucucacacacagcaccc

SEQ ID NO: 5489 - RNA, 20 nt, Artificial Sequence
  targeting sequence with TTCN PAM
ccacuuggcauaccuuaaag

SEQ ID NO: 5490 - RNA, 20 nt, Artificial Sequence
  targeting sequence with TTCN PAM
ugacguucuccacuuggcau

SEQ ID NO: 5491 - RNA, 20 nt, Artificial Sequence
  targeting sequence with TTCN PAM
uguucagaaauccaaggugg

SEQ ID NO: 5492 - RNA, 20 nt, Artificial Sequence
  targeting sequence with TTCN PAM
gaaauccaaggugggugcgg

SEQ ID NO: 5493 - RNA, 20 nt, Artificial Sequence
  targeting sequence with TTCN PAM
gaacaugaacauccagcucu

SEQ ID NO: 5494 - RNA, 20 nt, Artificial Sequence
  targeting sequence with TTCN PAM
cuccgcacccaccuuggauu

SEQ ID NO: 5495 - RNA, 20 nt, Artificial Sequence
  targeting sequence with TTCN PAM
ggaccaccaguaaagguuug

SEQ ID NO: 5496 - RNA, 20 nt, Artificial Sequence
  targeting sequence with TTCN PAM
uaguacugccucuucuggac

SEQ ID NO: 5497 - RNA, 20 nt, Artificial Sequence
  targeting sequence with TTCN PAM
cugucuccuuccuaguacug

SEQ ID NO: 5498 - RNA, 20 nt, Artificial Sequence
  targeting sequence with TTCN PAM
uucucugucuccuuccuagu

SEQ ID NO: 5499 - RNA, 20 nt, Artificial Sequence
  targeting sequence with TTCN PAM
ggcuguuccuucucugucuc

SEQ ID NO: 5500 - RNA, 20 nt, Artificial Sequence
  targeting sequence with TTCN PAM
ucaaacccuucuggcuguuc

SEQ ID NO: 5501 - RNA, 20 nt, Artificial Sequence
  targeting sequence with TTCN PAM
cucucguaguuuuccucaaa

SEQ ID NO: 5502 - RNA, 20 nt, Artificial Sequence
  targeting sequence with TTCN PAM
ugacacuucucucucguagu

SEQ ID NO: 5503 - RNA, 20 nt, Artificial Sequence
  targeting sequence with TTCN PAM
agggcuuuccugacacuucu

SEQ ID NO: 5504 - RNA, 20 nt, Artificial Sequence
  targeting sequence with TTCN PAM
aacgggaagagcgccaggag

SEQ ID NO: 5505 - RNA, 20 nt, Artificial Sequence
  targeting sequence with TTCN PAM
cguuugaaacacuauuccag

SEQ ID NO: 5506 - RNA, 20 nt, Artificial Sequence
  targeting sequence with TTCN PAM
ggccucaucuuagccgacug

SEQ ID NO: 5507 - RNA, 20 nt, Artificial Sequence
  targeting sequence with TTCN PAM
cuccaacucagcaguugggg

SEQ ID NO: 5508 - RNA, 20 nt, Artificial Sequence
  targeting sequence with TTCN PAM
cugcuaacucccucuucucu

SEQ ID NO: 5509 - RNA, 20 nt, Artificial Sequence
  targeting sequence with TTCN PAM
gccucuucccugcuaacucc

SEQ ID NO: 5510 - RNA, 20 nt, Artificial Sequence
  targeting sequence with TTCN PAM
uaucucucacucgcucuuca

SEQ ID NO: 5511 - RNA, 20 nt, Artificial Sequence
  targeting sequence with TTCN PAM
ccauuuucuuaucucucacu

SEQ ID NO: 5512 - RNA, 20 nt, Artificial Sequence
  targeting sequence with TTCN PAM
cuaaacuuaacuuuccccau

SEQ ID NO: 5513 - RNA, 20 nt, Artificial Sequence
  targeting sequence with TTCN PAM
acuaauucucuaaacuuaac

SEQ ID NO: 5514 - RNA, 20 nt, Artificial Sequence
  targeting sequence with TTCN PAM
uugcagccaaacuucgacua

SEQ ID NO: 5515 - RNA, 20 nt, Artificial Sequence
  targeting sequence with TTCN PAM
cuucuuugcagccaaacuuc

SEQ ID NO: 5516 - RNA, 20 nt, Artificial Sequence
  targeting sequence with TTCN PAM
uuucucuucuuugcagccaa

SEQ ID NO: 5517 - RNA, 20 nt, Artificial Sequence
  targeting sequence with TTCN PAM
cccuguugccccugccuucu

SEQ ID NO: 5518 - RNA, 20 nt, Artificial Sequence
  targeting sequence with TTCN PAM
gcccugucaaagccucucuu

SEQ ID NO: 5519 - RNA, 20 nt, Artificial Sequence
  targeting sequence with TTCN PAM
gcccugucaaagccucucuu

SEQ ID NO: 5520 - RNA, 20 nt, Artificial Sequence
  targeting sequence with TTCN PAM
cuucugcccugucaaagccu

SEQ ID NO: 5521 - RNA, 20 nt, Artificial Sequence
  targeting sequence with TTCN PAM
cagcgacgucucagcacacu

SEQ ID NO: 5522 - RNA, 20 nt, Artificial Sequence
  targeting sequence with TTCN PAM
ggauauugaagaguuacaua

SEQ ID NO: 5523 - RNA, 20 nt, Artificial Sequence
  targeting sequence with TTCN PAM
auauccagaacgcuccaccc

SEQ ID NO: 5524 - RNA, 20 nt, Artificial Sequence
  targeting sequence with TTCN PAM
aauguguauguaacucuuca

SEQ ID NO: 5525 - RNA, 20 nt, Artificial Sequence
  targeting sequence with TTCN PAM
cacugucacaggagaggaga

SEQ ID NO: 5526 - RNA, 20 nt, Artificial Sequence
  targeting sequence with TTCN PAM
ugucuccucuccugugacag

SEQ ID NO: 5527 - RNA, 20 nt, Artificial Sequence
  targeting sequence with TTCN PAM
caagcaucugcacuguucuu

SEQ ID NO: 5528 - RNA, 20 nt, Artificial Sequence
  targeting sequence with TTCN PAM
cugcaaaugaaguaggugau

SEQ ID NO: 5529 - RNA, 20 nt, Artificial Sequence
  targeting sequence with TTCN PAM
uuugcagagaaaauaaaagc

SEQ ID NO: 5530 - RNA, 20 nt, Artificial Sequence
  targeting sequence with TTCN PAM
guaaaaucagggugacagcu

SEQ ID NO: 5531 - RNA, 20 nt, Artificial Sequence
  targeting sequence with TTCN PAM
gauccucauaagcacuaugu

SEQ ID NO: 5532 - RNA, 20 nt, Artificial Sequence
  targeting sequence with TTCN PAM
uuuaauggggccuauucugu

SEQ ID NO: 5533 - RNA, 20 nt, Artificial Sequence
  targeting sequence with TTCN PAM
guaccaaguacugugaaggg

SEQ ID NO: 5534 - RNA, 20 nt, Artificial Sequence
  targeting sequence with TTCN PAM
caguacuugguacagaauag

SEQ ID NO: 5535 - RNA, 20 nt, Artificial Sequence
  targeting sequence with TTCN PAM
uuaacagcagucuccucugu

SEQ ID NO: 5536 - RNA, 20 nt, Artificial Sequence
  targeting sequence with TTCN PAM
aauagucuguaacuuuccuu

SEQ ID NO: 5537 - RNA, 20 nt, Artificial Sequence
  targeting sequence with TTCN PAM
guguuugcacacagugggug

SEQ ID NO: 5538 - RNA, 20 nt, Artificial Sequence
  targeting sequence with TTCN PAM
auacauauuuauuuucuuuu

SEQ ID NO: 5539 - RNA, 20 nt, Artificial Sequence
  targeting sequence with TTCN PAM
uuuucuacuauaaugauugg

SEQ ID NO: 5540 - RNA, 20 nt, Artificial Sequence
  targeting sequence with TTCN PAM
acuauaaugauugguauuaa

SEQ ID NO: 5541 - RNA, 20 nt, Artificial Sequence
  targeting sequence with TTCN PAM
uuuuuuaaaaauacauguca

SEQ ID NO: 5542 - RNA, 20 nt, Artificial Sequence
  targeting sequence with TTCN PAM
uggacuccccuggcaagcag

SEQ ID NO: 5543 - RNA, 20 nt, Artificial Sequence
  targeting sequence with TTCN PAM
agagcacgggagcuuuucuu

SEQ ID NO: 5544 - RNA, 20 nt, Artificial Sequence
  targeting sequence with TTCN PAM
uucaagaguccacauuucca

SEQ ID NO: 5545 - RNA, 20 nt, Artificial Sequence
  targeting sequence with TTCN PAM
agaguccacauuuccaggaa

SEQ ID NO: 5546 - RNA, 20 nt, Artificial Sequence
  targeting sequence with TTCN PAM
aggaaggcuggugagagcaa

SEQ ID NO: 5547 - RNA, 20 nt, Artificial Sequence
  targeting sequence with TTCN PAM
uggaaauguggacucuugaa

SEQ ID NO: 5548 - RNA, 20 nt, Artificial Sequence
  targeting sequence with TTCN PAM
guaaccuggcaaggcagaau

SEQ ID NO: 5549 - RNA, 20 nt, Artificial Sequence
  targeting sequence with TTCN PAM
gccuugccagguuacugaaa

SEQ ID NO: 5550 - RNA, 20 nt, Artificial Sequence
  targeting sequence with TTCN PAM
cuuuauucugccuugccagg

SEQ ID NO: 5551 - RNA, 20 nt, Artificial Sequence
  targeting sequence with TTCN PAM
agcuuguucacuuuauucug

SEQ ID NO: 5552 - RNA, 20 nt, Artificial Sequence
  targeting sequence with TTCN PAM
uuccagcuuguucacuuuau

SEQ ID NO: 5553 - RNA, 20 nt, Artificial Sequence
  targeting sequence with TTCN PAM
ucgggacuaccugcaggcug

SEQ ID NO: 5554 - RNA, 20 nt, Artificial Sequence
  targeting sequence with TTCN PAM
auucacuucacacugcagca

SEQ ID NO: 5555 - RNA, 20 nt, Artificial Sequence
  targeting sequence with TTCN PAM
cuucacacugcagcacuacu

SEQ ID NO: 5556 - RNA, 20 nt, Artificial Sequence
  targeting sequence with TTCN PAM
cacugcagcacuacucagcc

SEQ ID NO: 5557 - RNA, 20 nt, Artificial Sequence
  targeting sequence with TTCN PAM
agaggaagcaucuuguuuuc

SEQ ID NO: 5558 - RNA, 20 nt, Artificial Sequence
  targeting sequence with TTCN PAM
ucuggaaugugaguccaaag

SEQ ID NO: 5559 - RNA, 20 nt, Artificial Sequence
  targeting sequence with TTCN PAM
cucagcuguggaaauucuuu

SEQ ID NO: 5560 - RNA, 20 nt, Artificial Sequence
  targeting sequence with TTCN PAM
acagcugagggaaaacaaga

SEQ ID NO: 5561 - RNA, 20 nt, Artificial Sequence
  targeting sequence with TTCN PAM
uuuuggaaagcuuaagagca

SEQ ID NO: 5562 - RNA, 20 nt, Artificial Sequence
  targeting sequence with TTCN PAM
aaaaagaauuuccacagcug

SEQ ID NO: 5563 - RNA, 20 nt, Artificial Sequence
  targeting sequence with TTCN PAM
cauuggcaggacuacucucc

SEQ ID NO: 5564 - RNA, 20 nt, Artificial Sequence
  targeting sequence with TTCN PAM
ugauugcucuuuuucauuca

SEQ ID NO: 5565 - RNA, 20 nt, Artificial Sequence
  targeting sequence with TTCN PAM
uucaacaaagcuguggcaua

SEQ ID NO: 5566 - RNA, 20 nt, Artificial Sequence
  targeting sequence with TTCN PAM
acaaagcuguggcauacgcu

SEQ ID NO: 5567 - RNA, 20 nt, Artificial Sequence
  targeting sequence with TTCN PAM
gcaggacacguuagcguaug

SEQ ID NO: 5568 - RNA, 20 nt, Artificial Sequence
  targeting sequence with TTCN PAM
aacacaagacgacaaaguua

SEQ ID NO: 5569 - RNA, 20 nt, Artificial Sequence
  targeting sequence with TTCN PAM
guggcagcagcaaccgccag

SEQ ID NO: 5570 - RNA, 20 nt, Artificial Sequence
  targeting sequence with TTCN PAM
cuggcgguugcugcugccac

SEQ ID NO: 5571 - RNA, 20 nt, Artificial Sequence
  targeting sequence with TTCN PAM
ucugaccuucagugggaccg

SEQ ID NO: 5572 - RNA, 20 nt, Artificial Sequence
  targeting sequence with TTCN PAM
gugggaccggaggccugaga

SEQ ID NO: 5573 - RNA, 20 nt, Artificial Sequence
  targeting sequence with TTCN PAM
ucacagucaccagaaccccc

SEQ ID NO: 5574 - RNA, 20 nt, Artificial Sequence
  targeting sequence with TTCN PAM
ggugacugugaugaaggccu

SEQ ID NO: 5575 - RNA, 20 nt, Artificial Sequence
  targeting sequence with TTCN PAM
uucuagacaaauaaucugca

SEQ ID NO: 5576 - RNA, 20 nt, Artificial Sequence
  targeting sequence with TTCN PAM
agacaaauaaucugcacaaa

SEQ ID NO: 5577 - RNA, 20 nt, Artificial Sequence
  targeting sequence with TTCN PAM
uuucauagaaauccaauugu

SEQ ID NO: 5578 - RNA, 20 nt, Artificial Sequence
  targeting sequence with TTCN PAM
uagaaauccaauuguuucuu

SEQ ID NO: 5579 - RNA, 20 nt, Artificial Sequence
  targeting sequence with TTCN PAM
augaaaagaaaacagauugg

SEQ ID NO: 5580 - RNA, 20 nt, Artificial Sequence
  targeting sequence with TTCN PAM
ucugcuuguucucaucuuca

SEQ ID NO: 5581 - RNA, 20 nt, Artificial Sequence
  targeting sequence with TTCN PAM
gcuuguucucaucuucaacu

SEQ ID NO: 5582 - RNA, 20 nt, Artificial Sequence
  targeting sequence with TTCN PAM
caucuucaacucauaccucu

SEQ ID NO: 5583 - RNA, 20 nt, Artificial Sequence
  targeting sequence with TTCN PAM
acucauaccucucuucucag

SEQ ID NO: 5584 - RNA, 20 nt, Artificial Sequence
  targeting sequence with TTCN PAM
cagagguugcaguuucugag

SEQ ID NO: 5585 - RNA, 20 nt, Artificial Sequence
  targeting sequence with TTCN PAM
gagaaacacacugaaaaucc

SEQ ID NO: 5586 - RNA, 20 nt, Artificial Sequence
  targeting sequence with TTCN PAM
cagaaacugcaaccucugag

SEQ ID NO: 5587 - RNA, 20 nt, Artificial Sequence
  targeting sequence with TTCN PAM
guguguuucucagaaacugc

SEQ ID NO: 5588 - RNA, 20 nt, Artificial Sequence
  targeting sequence with TTCN PAM
gcucaggugagaguugucuc

SEQ ID NO: 5589 - RNA, 20 nt, Artificial Sequence
  targeting sequence with TTCN PAM
cugaaagguuuuuccaguug

SEQ ID NO: 5590 - RNA, 20 nt, Artificial Sequence
  targeting sequence with TTCN PAM
gcgaaccauuucagcucagg

SEQ ID NO: 5591 - RNA, 20 nt, Artificial Sequence
  targeting sequence with TTCN PAM
aguugauguuucauuagaga

SEQ ID NO: 5592 - RNA, 20 nt, Artificial Sequence
  targeting sequence with TTCN PAM
uuagagacauuacucugugg

SEQ ID NO: 5593 - RNA, 20 nt, Artificial Sequence
  targeting sequence with TTCN PAM
gacaucugagaugaaagguc

SEQ ID NO: 5594 - RNA, 20 nt, Artificial Sequence
  targeting sequence with TTCN PAM
ucucagaugucagaacauua

SEQ ID NO: 5595 - RNA, 20 nt, Artificial Sequence
  targeting sequence with TTCN PAM
caguuucuaccauuagauau

SEQ ID NO: 5596 - RNA, 20 nt, Artificial Sequence
  targeting sequence with TTCN PAM
accauuagauauugagucuu

SEQ ID NO: 5597 - RNA, 20 nt, Artificial Sequence
  targeting sequence with TTCN PAM
aucacauaaagcgauucaag

SEQ ID NO: 5598 - RNA, 20 nt, Artificial Sequence
  targeting sequence with TTCN PAM
agaccucagucaaguauugc

SEQ ID NO: 5599 - RNA, 20 nt, Artificial Sequence
  targeting sequence with TTCN PAM
uauaucaucaucccuaccuu

SEQ ID NO: 5600 - RNA, 20 nt, Artificial Sequence
  targeting sequence with TTCN PAM
ccuaugaaguuaagacauau

SEQ ID NO: 5601 - RNA, 20 nt, Artificial Sequence
  targeting sequence with TTCN PAM
uaggggaaaagguagggaug

SEQ ID NO: 5602 - RNA, 20 nt, Artificial Sequence
  targeting sequence with TTCN PAM
uugcuacaguuuauaucuug

SEQ ID NO: 5603 - RNA, 20 nt, Artificial Sequence
  targeting sequence with TTCN PAM
aacauuucuuugcuacaguu

SEQ ID NO: 5604 - RNA, 20 nt, Artificial Sequence
  targeting sequence with TTCN PAM
gauuucaaacauuucuuugc

SEQ ID NO: 5605 - RNA, 20 nt, Artificial Sequence
  targeting sequence with TTCN PAM
guucuagagauuuuuccuga

SEQ ID NO: 5606 - RNA, 20 nt, Artificial Sequence
  targeting sequence with TTCN PAM
agagauuuuuccugacaaga

SEQ ID NO: 5607 - RNA, 20 nt, Artificial Sequence
  targeting sequence with TTCN PAM
ugacaagaugugcuauuauu

SEQ ID NO: 5608 - RNA, 20 nt, Artificial Sequence
  targeting sequence with TTCN PAM
uauguuacagcuagaaaaau

SEQ ID NO: 5609 - RNA, 20 nt, Artificial Sequence
  targeting sequence with TTCN PAM
agcuguaacauaggaaucaa

SEQ ID NO: 5610 - RNA, 20 nt, Artificial Sequence
  targeting sequence with TTCN PAM
auguucaguuaccuucuucu

SEQ ID NO: 5611 - RNA, 20 nt, Artificial Sequence
  targeting sequence with TTCN PAM
guuaccuucuucuguagcca

SEQ ID NO: 5612 - RNA, 20 nt, Artificial Sequence
  targeting sequence with TTCN PAM
ucuguagccacugcacagcc

SEQ ID NO: 5613 - RNA, 20 nt, Artificial Sequence
  targeting sequence with TTCN PAM
guagccacugcacagcccag

SEQ ID NO: 5614 - RNA, 20 nt, Artificial Sequence
  targeting sequence with TTCN PAM
caccacuggagcugggcugu

SEQ ID NO: 5615 - RNA, 20 nt, Artificial Sequence
  targeting sequence with TTCN PAM
ccuugaaguacuccuuagcu

SEQ ID NO: 5616 - RNA, 20 nt, Artificial Sequence
  targeting sequence with TTCN PAM
aggagaauucccaccacugg

SEQ ID NO: 5617 - RNA, 20 nt, Artificial Sequence
  targeting sequence with TTCN PAM
uucuuugcuuguuccuagug

SEQ ID NO: 5618 - RNA, 20 nt, Artificial Sequence
  targeting sequence with TTCN PAM
uugcuuguuccuagugcuuc

SEQ ID NO: 5619 - RNA, 20 nt, Artificial Sequence
  targeting sequence with TTCN PAM
uagugcuucauuuugaaacg

SEQ ID NO: 5620 - RNA, 20 nt, Artificial Sequence
  targeting sequence with TTCN PAM
uuuugaaacguaaaugcuag

SEQ ID NO: 5621 - RNA, 20 nt, Artificial Sequence
  targeting sequence with TTCN PAM
aaaugaagcacuaggaacaa

SEQ ID NO: 5622 - RNA, 20 nt, Artificial Sequence
  targeting sequence with TTCN PAM
uuaaaauucaguugucuuua

SEQ ID NO: 5623 - RNA, 20 nt, Artificial Sequence
  targeting sequence with TTCN PAM
guugucuuuauauuugugau

SEQ ID NO: 5624 - RNA, 20 nt, Artificial Sequence
  targeting sequence with TTCN PAM
acuuaaaugggguuccuaga

SEQ ID NO: 5625 - RNA, 20 nt, Artificial Sequence
  targeting sequence with TTCN PAM
uagaguagucaaauucaugg

SEQ ID NO: 5626 - RNA, 20 nt, Artificial Sequence
  targeting sequence with TTCN PAM
uggagacagaaauuacaauu

SEQ ID NO: 5627 - RNA, 20 nt, Artificial Sequence
  targeting sequence with TTCN PAM
gucuccaugaauuugacuac

SEQ ID NO: 5628 - RNA, 20 nt, Artificial Sequence
  targeting sequence with TTCN PAM
cccaggggcugggggaaggg

SEQ ID NO: 5629 - RNA, 20 nt, Artificial Sequence
  targeting sequence with TTCN PAM
cccagccccugggggaagca

SEQ ID NO: 5630 - RNA, 20 nt, Artificial Sequence
  targeting sequence with TTCN PAM
ucccuucccccagccccugg

SEQ ID NO: 5631 - RNA, 20 nt, Artificial Sequence
  targeting sequence with TTCN PAM
auagguccagaguuucaguu

SEQ ID NO: 5632 - RNA, 20 nt, Artificial Sequence
  targeting sequence with TTCN PAM
guuucagaagaugaaaagag

SEQ ID NO: 5633 - RNA, 20 nt, Artificial Sequence
  targeting sequence with TTCN PAM
gaagaugaaaagaguucugg

SEQ ID NO: 5634 - RNA, 20 nt, Artificial Sequence
  targeting sequence with TTCN PAM
gaaacugaaacucuggaccu

SEQ ID NO: 5635 - RNA, 20 nt, Artificial Sequence
  targeting sequence with TTCN PAM
ucuucugaaacugaaacucu

SEQ ID NO: 5636 - RNA, 20 nt, Artificial Sequence
  targeting sequence with TTCN PAM
ggagauggaugguggugaug

SEQ ID NO: 5637 - RNA, 20 nt, Artificial Sequence
  targeting sequence with TTCN PAM
cacugaugugcaaccaucac

SEQ ID NO: 5638 - RNA, 20 nt, Artificial Sequence
  targeting sequence with TTCN PAM
gugacuuuaaguacauucac

SEQ ID NO: 5639 - RNA, 20 nt, Artificial Sequence
  targeting sequence with TTCN PAM
aauaguaaauuuuauguuau

SEQ ID NO: 5640 - RNA, 20 nt, Artificial Sequence
  targeting sequence with TTCN PAM
ccacaauuaaaaaaaaaaga

SEQ ID NO: 5641 - RNA, 20 nt, Artificial Sequence
  targeting sequence with TTCN PAM
uuuuuuuuuaauugugguga

SEQ ID NO: 5642 - RNA, 20 nt, Artificial Sequence
  targeting sequence with TTCN PAM
uuuugcagucaaucagccug

SEQ ID NO: 5643 - RNA, 20 nt, Artificial Sequence
  targeting sequence with TTCN PAM
aguuuucacucuaugacucu

SEQ ID NO: 5644 - RNA, 20 nt, Artificial Sequence
  targeting sequence with TTCN PAM
cucuaugacucuaggcaugu

SEQ ID NO: 5645 - RNA, 20 nt, Artificial Sequence
  targeting sequence with TTCN PAM
ugagguuaguacaguuguga

SEQ ID NO: 5646 - RNA, 20 nt, Artificial Sequence
  targeting sequence with TTCN PAM
ucuuuguaacaacuucauga

SEQ ID NO: 5647 - RNA, 20 nt, Artificial Sequence
  targeting sequence with TTCN PAM
ugacacggugccuggguuca

SEQ ID NO: 5648 - RNA, 20 nt, Artificial Sequence
  targeting sequence with TTCN PAM
caagugcucaggagcuacag

SEQ ID NO: 5649 - RNA, 20 nt, Artificial Sequence
  targeting sequence with TTCN PAM
aaucaugucaccuguagcuc

SEQ ID NO: 5650 - RNA, 20 nt, Artificial Sequence
  targeting sequence with TTCN PAM
gagguuagggaccuagagcc

SEQ ID NO: 5651 - RNA, 20 nt, Artificial Sequence
  targeting sequence with TTCN PAM
ggcucuaggucccuaaccuc

SEQ ID NO: 5652 - RNA, 20 nt, Artificial Sequence
  targeting sequence with TTCN PAM
cauuaauguaacccagcuac

SEQ ID NO: 5653 - RNA, 20 nt, Artificial Sequence
  targeting sequence with TTCN PAM
cucaagguuucucauuaaug

SEQ ID NO: 5654 - RNA, 20 nt, Artificial Sequence
  targeting sequence with TTCN PAM
ugagcuuucacucaagguuu

SEQ ID NO: 5655 - RNA, 20 nt, Artificial Sequence
  targeting sequence with TTCN PAM
ugccuuucugacauaaggcc

SEQ ID NO: 5656 - RNA, 20 nt, Artificial Sequence
  targeting sequence with TTCN PAM
gacauaaggccugaugggug

SEQ ID NO: 5657 - RNA, 20 nt, Artificial Sequence
  targeting sequence with TTCN PAM
gggauucuauaaagaucugu

SEQ ID NO: 5658 - RNA, 20 nt, Artificial Sequence
  targeting sequence with TTCN PAM
auaaagaucugucacucuuu

SEQ ID NO: 5659 - RNA, 20 nt, Artificial Sequence
  targeting sequence with TTCN PAM
ccucauauuuuuuugagauc

SEQ ID NO: 5660 - RNA, 20 nt, Artificial Sequence
  targeting sequence with TTCN PAM
guaccuuccaagcaagcagg

SEQ ID NO: 5661 - RNA, 20 nt, Artificial Sequence
  targeting sequence with TTCN PAM
aagcaagcaggcccugacug

SEQ ID NO: 5662 - RNA, 20 nt, Artificial Sequence
  targeting sequence with TTCN PAM
ccagguaucaaaaccgggca

SEQ ID NO: 5663 - RNA, 20 nt, Artificial Sequence
  targeting sequence with TTCN PAM
ccuucugcucauaugugacu

SEQ ID NO: 5664 - RNA, 20 nt, Artificial Sequence
  targeting sequence with TTCN PAM
gcucauaugugacuuguaau

SEQ ID NO: 5665 - RNA, 20 nt, Artificial Sequence
  targeting sequence with TTCN PAM
ucccugcauuuuaauucaau

SEQ ID NO: 5666 - RNA, 20 nt, Artificial Sequence
  targeting sequence with TTCN PAM
auacuuacuuuugagcaaga

SEQ ID NO: 5667 - RNA, 20 nt, Artificial Sequence
  targeting sequence with TTCN PAM
ugucacucuugcucaaaagu

SEQ ID NO: 5668 - RNA, 20 nt, Artificial Sequence
  targeting sequence with TTCN PAM
cucagcuuugaugcaccaca

SEQ ID NO: 5669 - RNA, 20 nt, Artificial Sequence
  targeting sequence with TTCN PAM
cuucccucagcuuugaugca

SEQ ID NO: 5670 - RNA, 20 nt, Artificial Sequence
  targeting sequence with TTCN PAM
guugagucuuuuauuguuaa

SEQ ID NO: 5671 - RNA, 20 nt, Artificial Sequence
  targeting sequence with TTCN PAM
aaaaaucgacaaacuauuuu

SEQ ID NO: 5672 - RNA, 20 nt, Artificial Sequence
  targeting sequence with TTCN PAM
uuaucuguuuauuaaaauag

SEQ ID NO: 5673 - RNA, 20 nt, Artificial Sequence
  targeting sequence with TTCN PAM
guugagucaggcaccaccau

SEQ ID NO: 5674 - RNA, 20 nt, Artificial Sequence
  targeting sequence with TTCN PAM
aauggguggaaacacuacuu

SEQ ID NO: 5675 - RNA, 20 nt, Artificial Sequence
  targeting sequence with TTCN PAM
acccauuagaauuuagggau

SEQ ID NO: 5676 - RNA, 20 nt, Artificial Sequence
  targeting sequence with TTCN PAM
ccuaaaagucaaacuugcag

SEQ ID NO: 5677 - RNA, 20 nt, Artificial Sequence
  targeting sequence with TTCN PAM
guucuccuaaaagucaaacu

SEQ ID NO: 5678 - RNA, 20 nt, Artificial Sequence
  targeting sequence with TTCN PAM
uguucaguucuccuaaaagu

SEQ ID NO: 5679 - RNA, 20 nt, Artificial Sequence
  targeting sequence with TTCN PAM
ccuagagacuuuuccacaua

SEQ ID NO: 5680 - RNA, 20 nt, Artificial Sequence
  targeting sequence with TTCN PAM
acauaucauauuacugagag

SEQ ID NO: 5681 - RNA, 20 nt, Artificial Sequence
  targeting sequence with TTCN PAM
aguacuuuuagauugauaaa

SEQ ID NO: 5682 - RNA, 20 nt, Artificial Sequence
  targeting sequence with TTCN PAM
uuuaucaaucuaaaaguacu

SEQ ID NO: 5683 - RNA, 20 nt, Artificial Sequence
  targeting sequence with TTCN PAM
gcaauuaucaccugcucuau

SEQ ID NO: 5684 - RNA, 20 nt, Artificial Sequence
  targeting sequence with TTCN PAM
ucauguugcucaggcugguc

SEQ ID NO: 5685 - RNA, 20 nt, Artificial Sequence
  targeting sequence with TTCN PAM
agucuagagugcaguggcau

SEQ ID NO: 5686 - RNA, 20 nt, Artificial Sequence
  targeting sequence with TTCN PAM
agacggccuguguguggcuc

SEQ ID NO: 5687 - RNA, 20 nt, Artificial Sequence
  targeting sequence with TTCN PAM
aaaggguggccugaaaagcu

SEQ ID NO: 5688 - RNA, 20 nt, Artificial Sequence
  targeting sequence with TTCN PAM
ggccacccuuuggaacgcug

SEQ ID NO: 5689 - RNA, 20 nt, Artificial Sequence
  targeting sequence with TTCN PAM
gcuuuucaggccacccuuug

SEQ ID NO: 5690 - RNA, 20 nt, Artificial Sequence
  targeting sequence with TTCN PAM
acaacagaaaaaggcccuaa

SEQ ID NO: 5691 - RNA, 20 nt, Artificial Sequence
  targeting sequence with TTCN PAM
guuguagaaaaaagauuuaa

SEQ ID NO: 5692 - RNA, 20 nt, Artificial Sequence
  targeting sequence with TTCN PAM
gauuaaguggaaauacaggu

SEQ ID NO: 5693 - RNA, 20 nt, Artificial Sequence
  targeting sequence with TTCN PAM
acuuaaucugaaucauuuua

SEQ ID NO: 5694 - RNA, 20 nt, Artificial Sequence
  targeting sequence with TTCN PAM
accauuuaccuguauuucca

SEQ ID NO: 5695 - RNA, 20 nt, Artificial Sequence
  targeting sequence with TTCN PAM
uaacuaaacuuuuucuaaua

SEQ ID NO: 5696 - RNA, 20 nt, Artificial Sequence
  targeting sequence with TTCN PAM
aauaaauagcucaggaaagc

SEQ ID NO: 5697 - RNA, 20 nt, Artificial Sequence
  targeting sequence with TTCN PAM
ugagcuauuuauuagaaaaa

SEQ ID NO: 5698 - RNA, 20 nt, Artificial Sequence
  targeting sequence with TTCN PAM
gaaaaagaaagcccugccca

SEQ ID NO: 5699 - RNA, 20 nt, Artificial Sequence
  targeting sequence with TTCN PAM
gaaggcuaaauuggcuuucc

SEQ ID NO: 5700 - RNA, 20 nt, Artificial Sequence
  targeting sequence with TTCN PAM
uuuucagaaggcuaaauugg

SEQ ID NO: 5701 - RNA, 20 nt, Artificial Sequence
  targeting sequence with TTCN PAM
cagucuacucuuaaguuguu

SEQ ID NO: 5702 - RNA, 20 nt, Artificial Sequence
  targeting sequence with TTCN PAM
cauuucaugagccugacaac

SEQ ID NO: 5703 - RNA, 20 nt, Artificial Sequence
  targeting sequence with TTCN PAM
ugagccugacaacauccugc

SEQ ID NO: 5704 - RNA, 20 nt, Artificial Sequence
  targeting sequence with TTCN PAM
cuccccaguggcuacagagu

SEQ ID NO: 5705 - RNA, 20 nt, Artificial Sequence
  targeting sequence with TTCN PAM
acucuguagccacuggggag

SEQ ID NO: 5706 - RNA, 20 nt, Artificial Sequence
  targeting sequence with TTCN PAM
uucuacucuguagccacugg

SEQ ID NO: 5707 - RNA, 20 nt, Artificial Sequence
  targeting sequence with TTCN PAM
ugcaucagggaguggccguu

SEQ ID NO: 5708 - RNA, 20 nt, Artificial Sequence
  targeting sequence with TTCN PAM
acaagcuaacggccacuccc

SEQ ID NO: 5709 - RNA, 20 nt, Artificial Sequence
  targeting sequence with TTCN PAM
ggggugcugugaguuuuuuu

SEQ ID NO: 5710 - RNA, 20 nt, Artificial Sequence
  targeting sequence with TTCN PAM
uuuaccagauaaggcaagau

SEQ ID NO: 5711 - RNA, 20 nt, Artificial Sequence
  targeting sequence with TTCN PAM
ugacuaaaagaggagaaaug

SEQ ID NO: 5712 - RNA, 20 nt, Artificial Sequence
  targeting sequence with TTCN PAM
ccucuuuuagucaggaaggu

SEQ ID NO: 5713 - RNA, 20 nt, Artificial Sequence
  targeting sequence with TTCN PAM
cacccuacacauuucuccuc

SEQ ID NO: 5714 - RNA, 20 nt, Artificial Sequence
  targeting sequence with TTCN PAM
gaccagaaugagggagccca

SEQ ID NO: 5715 - RNA, 20 nt, Artificial Sequence
  targeting sequence with TTCN PAM
ggucagaaaaauuaaaaccc

SEQ ID NO: 5716 - RNA, 20 nt, Artificial Sequence
  targeting sequence with TTCN PAM
acuguaucagucacuguaga

SEQ ID NO: 5717 - RNA, 20 nt, Artificial Sequence
  targeting sequence with TTCN PAM
gccuccugcuacucucggug

SEQ ID NO: 5718 - RNA, 20 nt, Artificial Sequence
  targeting sequence with TTCN PAM
ggccaguucugccuccugcu

SEQ ID NO: 5719 - RNA, 20 nt, Artificial Sequence
  targeting sequence with TTCN PAM
gucucaaacacaaauuugac

SEQ ID NO: 5720 - RNA, 20 nt, Artificial Sequence
  targeting sequence with TTCN PAM
auaaccugggaaaggaagaa

SEQ ID NO: 5721 - RNA, 20 nt, Artificial Sequence
  targeting sequence with TTCN PAM
cagguuauugaagauccuau

SEQ ID NO: 5722 - RNA, 20 nt, Artificial Sequence
  targeting sequence with TTCN PAM
uuucccagguuauugaagau

SEQ ID NO: 5723 - RNA, 20 nt, Artificial Sequence
  targeting sequence with TTCN PAM
uccuuucccagguuauugaa

SEQ ID NO: 5724 - RNA, 20 nt, Artificial Sequence
  targeting sequence with TTCN PAM
uuuauuuacuaauuuuuguu

SEQ ID NO: 5725 - RNA, 20 nt, Artificial Sequence
  targeting sequence with TTCN PAM
uucuuuuauuuacuaauuuu

SEQ ID NO: 5726 - RNA, 20 nt, Artificial Sequence
  targeting sequence with TTCN PAM
uuauaauucuacccaagaga

SEQ ID NO: 5727 - RNA, 20 nt, Artificial Sequence
  targeting sequence with TTCN PAM
acccaagagauuaauuuagu

SEQ ID NO: 5728 - RNA, 20 nt, Artificial Sequence
  targeting sequence with TTCN PAM
gaacuagccugggcaacaaa

SEQ ID NO: 5729 - RNA, 20 nt, Artificial Sequence
  targeting sequence with TTCN PAM
gaacuccuggccucaaguga

SEQ ID NO: 5730 - RNA, 20 nt, Artificial Sequence
  targeting sequence with TTCN PAM
uuuuuuauuuuuuagagaug

SEQ ID NO: 5731 - RNA, 20 nt, Artificial Sequence
  targeting sequence with TTCN PAM
agacagagucucccucuguu

SEQ ID NO: 5732 - RNA, 20 nt, Artificial Sequence
  targeting sequence with TTCN PAM
uuuuuucaagacagagucuc

SEQ ID NO: 5733 - RNA, 20 nt, Artificial Sequence
  targeting sequence with TTCN PAM
cuuaguuuuaagauauauuu

SEQ ID NO: 5734 - RNA, 20 nt, Artificial Sequence
  targeting sequence with TTCN PAM
uuuccuaucuauguguugcu

SEQ ID NO: 5735 - RNA, 20 nt, Artificial Sequence
  targeting sequence with TTCN PAM
uaucuauguguugcuaucaa

SEQ ID NO: 5736 - RNA, 20 nt, Artificial Sequence
  targeting sequence with TTCN PAM
cuguggguuaugaggacaua

SEQ ID NO: 5737 - RNA, 20 nt, Artificial Sequence
  targeting sequence with TTCN PAM
auacauuuuuacuaagcaag

SEQ ID NO: 5738 - RNA, 20 nt, Artificial Sequence
  targeting sequence with TTCN PAM
aguucuuaguacugaacugu

SEQ ID NO: 5739 - RNA, 20 nt, Artificial Sequence
  targeting sequence with TTCN PAM
uaguacugaacugugcaugg

SEQ ID NO: 5740 - RNA, 20 nt, Artificial Sequence
  targeting sequence with TTCN PAM
guacuaagaacuagaaauac

SEQ ID NO: 5741 - RNA, 20 nt, Artificial Sequence
  targeting sequence with TTCN PAM
ucuaucaacaacaaacccau

SEQ ID NO: 5742 - RNA, 20 nt, Artificial Sequence
  targeting sequence with TTCN PAM
uuuugguccuagugcuuuua

SEQ ID NO: 5743 - RNA, 20 nt, Artificial Sequence
  targeting sequence with TTCN PAM
uuacuuccuuuugguccuag

SEQ ID NO: 5744 - RNA, 20 nt, Artificial Sequence
  targeting sequence with TTCN PAM
aguucuuuacuuccuuuugg

SEQ ID NO: 5745 - RNA, 20 nt, Artificial Sequence
  targeting sequence with TTCN PAM
uacucaaaacucuuuauuaa

SEQ ID NO: 5746 - RNA, 20 nt, Artificial Sequence
  targeting sequence with TTCN PAM
gugccaaggccucuauggag

SEQ ID NO: 5747 - RNA, 20 nt, Artificial Sequence
  targeting sequence with TTCN PAM
ugauacuccauagaggccuu

SEQ ID NO: 5748 - RNA, 20 nt, Artificial Sequence
  targeting sequence with TTCN PAM
aagggaacccaggcccucac

SEQ ID NO: 5749 - RNA, 20 nt, Artificial Sequence
  targeting sequence with TTCN PAM
aauucuugauacuccauaga

SEQ ID NO: 5750 - RNA, 20 nt, Artificial Sequence
  targeting sequence with TTCN PAM
cuucgaauucuugauacucc

SEQ ID NO: 5751 - RNA, 20 nt, Artificial Sequence
  targeting sequence with TTCN PAM
uuagagagugagggccuggg

SEQ ID NO: 5752 - RNA, 20 nt, Artificial Sequence
  targeting sequence with TTCN PAM
gagguuccuuagagagugag

SEQ ID NO: 5753 - RNA, 20 nt, Artificial Sequence
  targeting sequence with TTCN PAM
aaugauucucuuuccacaau

SEQ ID NO: 5754 - RNA, 20 nt, Artificial Sequence
  targeting sequence with TTCN PAM
cuuuccacaauaccucuuga

SEQ ID NO: 5755 - RNA, 20 nt, Artificial Sequence
  targeting sequence with TTCN PAM
acaauaccucuugaucuguc

SEQ ID NO: 5756 - RNA, 20 nt, Artificial Sequence
  targeting sequence with TTCN PAM
cacucagaauauucccagac

SEQ ID NO: 5757 - RNA, 20 nt, Artificial Sequence
  targeting sequence with TTCN PAM
gagugugaaauaauaaggcc

SEQ ID NO: 5758 - RNA, 20 nt, Artificial Sequence
  targeting sequence with TTCN PAM
cagacuccuaaauggucuuc

SEQ ID NO: 5759 - RNA, 20 nt, Artificial Sequence
  targeting sequence with TTCN PAM
aguucccaaucuugcauccu

SEQ ID NO: 5760 - RNA, 20 nt, Artificial Sequence
  targeting sequence with TTCN PAM
caaucuugcauccuucuuua

SEQ ID NO: 5761 - RNA, 20 nt, Artificial Sequence
  targeting sequence with TTCN PAM
uuacuccauccuucaauaca

SEQ ID NO: 5762 - RNA, 20 nt, Artificial Sequence
  targeting sequence with TTCN PAM
auacaacugccagaggauuu

SEQ ID NO: 5763 - RNA, 20 nt, Artificial Sequence
  targeting sequence with TTCN PAM
ccugcucuucacacuucuga

SEQ ID NO: 5764 - RNA, 20 nt, Artificial Sequence
  targeting sequence with TTCN PAM
cacuucugagaguggaaaga

SEQ ID NO: 5765 - RNA, 20 nt, Artificial Sequence
  targeting sequence with TTCN PAM
gagaguggaaagaauccuac

SEQ ID NO: 5766 - RNA, 20 nt, Artificial Sequence
  targeting sequence with TTCN PAM
acucucagaagugugaagag

SEQ ID NO: 5767 - RNA, 20 nt, Artificial Sequence
  targeting sequence with TTCN PAM
uuccacucucagaaguguga

SEQ ID NO: 5768 - RNA, 20 nt, Artificial Sequence
  targeting sequence with TTCN PAM
guuucauggcucuuaaaaau

SEQ ID NO: 5769 - RNA, 20 nt, Artificial Sequence
  targeting sequence with TTCN PAM
uggcucuuaaaaauauuuuu

SEQ ID NO: 5770 - RNA, 20 nt, Artificial Sequence
  targeting sequence with TTCN PAM
uaguacguacauacagucaa

SEQ ID NO: 5771 - RNA, 20 nt, Artificial Sequence
  targeting sequence with TTCN PAM
ggcuuuauaguuuaucaaau

SEQ ID NO: 5772 - RNA, 20 nt, Artificial Sequence
  targeting sequence with TTCN PAM
cagucacccucagagguaca

SEQ ID NO: 5773 - RNA, 20 nt, Artificial Sequence
  targeting sequence with TTCN PAM
ccacuguaggcccuggcagg

SEQ ID NO: 5774 - RNA, 20 nt, Artificial Sequence
  targeting sequence with TTCN PAM
guccccugcacuacaguugu

SEQ ID NO: 5775 - RNA, 20 nt, Artificial Sequence
  targeting sequence with TTCN PAM
ugucagucaugugucuaaug

SEQ ID NO: 5776 - RNA, 20 nt, Artificial Sequence
  targeting sequence with TTCN PAM
uuuggucugcauuuauugag

SEQ ID NO: 5777 - RNA, 20 nt, Artificial Sequence
  targeting sequence with TTCN PAM
ccauucauuuggucugcauu

SEQ ID NO: 5778 - RNA, 20 nt, Artificial Sequence
  targeting sequence with TTCN PAM
uaaauaaaagugagucagaa

SEQ ID NO: 5779 - RNA, 20 nt, Artificial Sequence
  targeting sequence with TTCN PAM
gacucacuuuuauuuaggaa

SEQ ID NO: 5780 - RNA, 20 nt, Artificial Sequence
  targeting sequence with TTCN PAM
ugaaguaguuggaacguauu

SEQ ID NO: 5781 - RNA, 20 nt, Artificial Sequence
  targeting sequence with TTCN PAM
ugaaauauugguaagucaua

SEQ ID NO: 5782 - RNA, 20 nt, Artificial Sequence
  targeting sequence with TTCN PAM
aacuacuucaugaaauauug

SEQ ID NO: 5783 - RNA, 20 nt, Artificial Sequence
  targeting sequence with TTCN PAM
uuaacucaugagguggagcc

SEQ ID NO: 5784 - RNA, 20 nt, Artificial Sequence
  targeting sequence with TTCN PAM
aguugguucugaaauauuuu

SEQ ID NO: 5785 - RNA, 20 nt, Artificial Sequence
  targeting sequence with TTCN PAM
gaaauauuuuuuaaaagcau

SEQ ID NO: 5786 - RNA, 20 nt, Artificial Sequence
  targeting sequence with TTCN PAM
gaaccaacuagaaacggcuc

SEQ ID NO: 5787 - RNA, 20 nt, Artificial Sequence
  targeting sequence with TTCN PAM
guggaaagcauauuggaaug

SEQ ID NO: 5788 - RNA, 20 nt, Artificial Sequence
  targeting sequence with TTCN PAM
acugaaguuuuuaugcuuuu

SEQ ID NO: 5789 - RNA, 20 nt, Artificial Sequence
  targeting sequence with TTCN PAM
aauaugcuuuccacugaagu

SEQ ID NO: 5790 - RNA, 20 nt, Artificial Sequence
  targeting sequence with TTCN PAM
agcucuaucaccuucuggcc

SEQ ID NO: 5791 - RNA, 20 nt, Artificial Sequence
  targeting sequence with TTCN PAM
ggccgacccuggacaaguca

SEQ ID NO: 5792 - RNA, 20 nt, Artificial Sequence
  targeting sequence with TTCN PAM
aggccuuaguuucucaaaug

SEQ ID NO: 5793 - RNA, 20 nt, Artificial Sequence
  targeting sequence with TTCN PAM
caaaugcuaagucugggaac

SEQ ID NO: 5794 - RNA, 20 nt, Artificial Sequence
  targeting sequence with TTCN PAM
cagacuuagcauuugagaaa

SEQ ID NO: 5795 - RNA, 20 nt, Artificial Sequence
  targeting sequence with TTCN PAM
guucccagacuuagcauuug

SEQ ID NO: 5796 - RNA, 20 nt, Artificial Sequence
  targeting sequence with TTCN PAM
uccagcugcaacacucugau

SEQ ID NO: 5797 - RNA, 20 nt, Artificial Sequence
  targeting sequence with TTCN PAM
agcugcaacacucugauacu

SEQ ID NO: 5798 - RNA, 20 nt, Artificial Sequence
  targeting sequence with TTCN PAM
uaguaaaguaucagaguguu

SEQ ID NO: 5799 - RNA, 20 nt, Artificial Sequence
  targeting sequence with TTCN PAM
uaauuucauaguaaaguauc

SEQ ID NO: 5800 - RNA, 20 nt, Artificial Sequence
  targeting sequence with TTCN PAM
ccuuccuaauuucauaguaa

SEQ ID NO: 5801 - RNA, 20 nt, Artificial Sequence
  targeting sequence with TTCN PAM
uuucuccuuccuaauuucau

SEQ ID NO: 5802 - RNA, 20 nt, Artificial Sequence
  targeting sequence with TTCN PAM
uuucuuuucuccuuccuaau

SEQ ID NO: 5803 - RNA, 20 nt, Artificial Sequence
  targeting sequence with TTCN PAM
agucacuaaacagauccgau

SEQ ID NO: 5804 - RNA, 20 nt, Artificial Sequence
  targeting sequence with TTCN PAM
agaagaugcugguagagcua

SEQ ID NO: 5805 - RNA, 20 nt, Artificial Sequence
  targeting sequence with TTCN PAM
ggaaaacaaacuaggauaug

SEQ ID NO: 5806 - RNA, 20 nt, Artificial Sequence
  targeting sequence with TTCN PAM
uguagcucuaccagcaucuu

SEQ ID NO: 5807 - RNA, 20 nt, Artificial Sequence
  targeting sequence with TTCN PAM
cauuuguauucuuguagcuc

SEQ ID NO: 5808 - RNA, 20 nt, Artificial Sequence
  targeting sequence with TTCN PAM
uagcauccuuaacucagagu

SEQ ID NO: 5809 - RNA, 20 nt, Artificial Sequence
  targeting sequence with TTCN PAM
auuuuauaagcugacuuuuu

SEQ ID NO: 5810 - RNA, 20 nt, Artificial Sequence
  targeting sequence with TTCN PAM
cuuaguauaucuuggcacau

SEQ ID NO: 5811 - RNA, 20 nt, Artificial Sequence
  targeting sequence with TTCN PAM
ucacuuaguauaucuuggca

SEQ ID NO: 5812 - RNA, 20 nt, Artificial Sequence
  targeting sequence with TTCN PAM
uagaacacacuccuucagcc

SEQ ID NO: 5813 - RNA, 20 nt, Artificial Sequence
  targeting sequence with TTCN PAM
augaauuuugccuucuucac

SEQ ID NO: 5814 - RNA, 20 nt, Artificial Sequence
  targeting sequence with TTCN PAM
gccauuuuaauaaaauuuau

SEQ ID NO: 5815 - RNA, 20 nt, Artificial Sequence
  targeting sequence with TTCN PAM
cacuuuuauacauauaaauu

SEQ ID NO: 5816 - RNA, 20 nt, Artificial Sequence
  targeting sequence with TTCN PAM
aagaggccagguacaguacu

SEQ ID NO: 5817 - RNA, 20 nt, Artificial Sequence
  targeting sequence with TTCN PAM
cguauuauaccaccucacug

SEQ ID NO: 5818 - RNA, 20 nt, Artificial Sequence
  targeting sequence with TTCN PAM
gugaggugguauaauacgug

SEQ ID NO: 5819 - RNA, 20 nt, Artificial Sequence
  targeting sequence with TTCN PAM
cagguugugaggauucagug

SEQ ID NO: 5820 - RNA, 20 nt, Artificial Sequence
  targeting sequence with TTCN PAM
ucuaugacugacuucacagg

SEQ ID NO: 5821 - RNA, 20 nt, Artificial Sequence
  targeting sequence with TTCN PAM
uccucuaugacugacuucac

SEQ ID NO: 5822 - RNA, 20 nt, Artificial Sequence
  targeting sequence with TTCN PAM
ucucuuugcuauuuacuaau

SEQ ID NO: 5823 - RNA, 20 nt, Artificial Sequence
  targeting sequence with TTCN PAM
cuacagaccuauaucagagg

SEQ ID NO: 5824 - RNA, 20 nt, Artificial Sequence
  targeting sequence with TTCN PAM
uguuaacacuacauguauca

SEQ ID NO: 5825 - RNA, 20 nt, Artificial Sequence
  targeting sequence with TTCN PAM
uuuaugcaccaguauuuaua

SEQ ID NO: 5826 - RNA, 20 nt, Artificial Sequence
  targeting sequence with TTCN PAM
gcaugccuucuuuuaugcac

SEQ ID NO: 5827 - RNA, 20 nt, Artificial Sequence
  targeting sequence with TTCN PAM
gugggcagaaacuaauauau

SEQ ID NO: 5828 - RNA, 20 nt, Artificial Sequence
  targeting sequence with TTCN PAM
gcccacagaauuucugcaug

SEQ ID NO: 5829 - RNA, 20 nt, Artificial Sequence
  targeting sequence with TTCN PAM
acuauguauauauuaguuuc

SEQ ID NO: 5830 - RNA, 20 nt, Artificial Sequence
  targeting sequence with TTCN PAM
uauaaagaggccuggaagga

SEQ ID NO: 5831 - RNA, 20 nt, Artificial Sequence
  targeting sequence with TTCN PAM
aggccucuuuauaugaauuu

SEQ ID NO: 5832 - RNA, 20 nt, Artificial Sequence
  targeting sequence with TTCN PAM
uuccaggccucuuuauauga

SEQ ID NO: 5833 - RNA, 20 nt, Artificial Sequence
  targeting sequence with TTCN PAM
uauuuauuuauuuauuauuu

SEQ ID NO: 5834 - RNA, 20 nt, Artificial Sequence
  targeting sequence with TTCN PAM
uggccuauauuuuuucuuuu

SEQ ID NO: 5835 - RNA, 20 nt, Artificial Sequence
  targeting sequence with TTCN PAM
uuuggccucauuucuaugcu

SEQ ID NO: 5836 - RNA, 20 nt, Artificial Sequence
  targeting sequence with TTCN PAM
augcuuaaauuuuucccaaa

SEQ ID NO: 5837 - RNA, 20 nt, Artificial Sequence
  targeting sequence with TTCN PAM
caaagagaguguaguaauua

SEQ ID NO: 5838 - RNA, 20 nt, Artificial Sequence
  targeting sequence with TTCN PAM
uuuuuaaucuuuaauuuuua

SEQ ID NO: 5839 - RNA, 20 nt, Artificial Sequence
  targeting sequence with TTCN PAM
aguauaggcucaguuuuauu

SEQ ID NO: 5840 - RNA, 20 nt, Artificial Sequence
  targeting sequence with TTCN PAM
uaaucauucuaguauaggcu

SEQ ID NO: 5841 - RNA, 20 nt, Artificial Sequence
  targeting sequence with TTCN PAM
cauagccuaaguuguuuuuc

SEQ ID NO: 5842 - RNA, 20 nt, Artificial Sequence
  targeting sequence with TTCN PAM
uuaagguaagaccucaguua

SEQ ID NO: 5843 - RNA, 20 nt, Artificial Sequence
  targeting sequence with TTCN PAM
caaugcugcauuucauuaag

SEQ ID NO: 5844 - RNA, 20 nt, Artificial Sequence
  targeting sequence with TTCN PAM
uucacaaugcugcauuucau

SEQ ID NO: 5845 - RNA, 20 nt, Artificial Sequence
  targeting sequence with TTCN PAM
guaaugagcauuuuuccuuc

SEQ ID NO: 5846 - RNA, 20 nt, Artificial Sequence
  targeting sequence with TTCN PAM
caccagguaauguuugcuuu

SEQ ID NO: 5847 - RNA, 20 nt, Artificial Sequence
  targeting sequence with TTCN PAM
caugucacaguuaacacucc

SEQ ID NO: 5848 - RNA, 20 nt, Artificial Sequence
  targeting sequence with TTCN PAM
guuaaaggcagcaacaacag

SEQ ID NO: 5849 - RNA, 20 nt, Artificial Sequence
  targeting sequence with TTCN PAM
ggcaguguuaauuaucuuaa

SEQ ID NO: 5850 - RNA, 20 nt, Artificial Sequence
  targeting sequence with TTCN PAM
uaacuguuagaagucuauag

SEQ ID NO: 5851 - RNA, 20 nt, Artificial Sequence
  targeting sequence with TTCN PAM
aacaguuaagaaacccuguu

SEQ ID NO: 5852 - RNA, 20 nt, Artificial Sequence
  targeting sequence with TTCN PAM
gggugucuaagccugucuga

SEQ ID NO: 5853 - RNA, 20 nt, Artificial Sequence
  targeting sequence with TTCN PAM
gacaggcuuagacacccuga

SEQ ID NO: 5854 - RNA, 20 nt, Artificial Sequence
  targeting sequence with TTCN PAM
ggagucguuuccaucaguuu

SEQ ID NO: 5855 - RNA, 20 nt, Artificial Sequence
  targeting sequence with TTCN PAM
aucaguuuuucaaaggcaaa

SEQ ID NO: 5856 - RNA, 20 nt, Artificial Sequence
  targeting sequence with TTCN PAM
aaggcaaaagcucccacaau

SEQ ID NO: 5857 - RNA, 20 nt, Artificial Sequence
  targeting sequence with TTCN PAM
gguuuuuuuuuuuaaauuaa

SEQ ID NO: 5858 - RNA, 20 nt, Artificial Sequence
  targeting sequence with TTCN PAM
uagauucacauaucuguaaa

SEQ ID NO: 5859 - RNA, 20 nt, Artificial Sequence
  targeting sequence with TTCN PAM
cauaucuguaaaucagguag

SEQ ID NO: 5860 - RNA, 20 nt, Artificial Sequence
  targeting sequence with TTCN PAM
cuaccugauuuacagauaug

SEQ ID NO: 5861 - RNA, 20 nt, Artificial Sequence
  targeting sequence with TTCN PAM
ucccuaccugauuuacagau

SEQ ID NO: 5862 - RNA, 20 nt, Artificial Sequence
  targeting sequence with TTCN PAM
aguccuucuucccuaccuga

SEQ ID NO: 5863 - RNA, 20 nt, Artificial Sequence
  targeting sequence with TTCN PAM
agcagagccgcccccagcug

SEQ ID NO: 5864 - RNA, 20 nt, Artificial Sequence
  targeting sequence with TTCN PAM
ccuuccagcagagccgcccc

SEQ ID NO: 5865 - RNA, 20 nt, Artificial Sequence
  targeting sequence with TTCN PAM
gaguuguaguauuccaggac

SEQ ID NO: 5866 - RNA, 20 nt, Artificial Sequence
  targeting sequence with TTCN PAM
aggaccaggaacacacaaaa

SEQ ID NO: 5867 - RNA, 20 nt, Artificial Sequence
  targeting sequence with TTCN PAM
ugguccuggaauacuacaac

SEQ ID NO: 5868 - RNA, 20 nt, Artificial Sequence
  targeting sequence with TTCN PAM
uccccaaucucuuuugugug

SEQ ID NO: 5869 - RNA, 20 nt, Artificial Sequence
  targeting sequence with TTCN PAM
uuaauuguagaggguuucau

SEQ ID NO: 5870 - RNA, 20 nt, Artificial Sequence
  targeting sequence with TTCN PAM
uccaucaaaaucauuucguu

SEQ ID NO: 5871 - RNA, 20 nt, Artificial Sequence
  targeting sequence with TTCN PAM
gccaagguccagaccuccag

SEQ ID NO: 5872 - RNA, 20 nt, Artificial Sequence
  targeting sequence with TTCN PAM
guucagccaagguccagacc

SEQ ID NO: 5873 - RNA, 20 nt, Artificial Sequence
  targeting sequence with TTCN PAM
cuuccacuaauuauuucuuu

SEQ ID NO: 5874 - RNA, 20 nt, Artificial Sequence
  targeting sequence with TTCN PAM
acuaauuauuucuuuuugac

SEQ ID NO: 5875 - RNA, 20 nt, Artificial Sequence
  targeting sequence with TTCN PAM
uuuugacauauaagaaaacu

SEQ ID NO: 5876 - RNA, 20 nt, Artificial Sequence
  targeting sequence with TTCN PAM
uauaugucaaaaagaaauaa

SEQ ID NO: 5877 - RNA, 20 nt, Artificial Sequence
  targeting sequence with TTCN PAM
aauuaaguuuucuuauaugu

SEQ ID NO: 5878 - RNA, 20 nt, Artificial Sequence
  targeting sequence with TTCN PAM
uucaaauuaaguuuucuuau

SEQ ID NO: 5879 - RNA, 20 nt, Artificial Sequence
  targeting sequence with TTCN PAM
uaacaauacucuucaugcca

SEQ ID NO: 5880 - RNA, 20 nt, Artificial Sequence
  targeting sequence with TTCN PAM
ugccaaacauaacucguaac

SEQ ID NO: 5881 - RNA, 20 nt, Artificial Sequence
  targeting sequence with TTCN PAM
ucaaacaggagggaaaaaaa

SEQ ID NO: 5882 - RNA, 20 nt, Artificial Sequence
  targeting sequence with TTCN PAM
cuccuguuugaggaaaauug

SEQ ID NO: 5883 - RNA, 20 nt, Artificial Sequence
  targeting sequence with TTCN PAM
aaagccauuuuuuucccucc

SEQ ID NO: 5884 - RNA, 20 nt, Artificial Sequence
  targeting sequence with TTCN PAM
cuucagacaugaacaacaag

SEQ ID NO: 5885 - RNA, 20 nt, Artificial Sequence
  targeting sequence with TTCN PAM
gacaugaacaacaaggcuuc

SEQ ID NO: 5886 - RNA, 20 nt, Artificial Sequence
  targeting sequence with TTCN PAM
ugucugaagggaaaccuuac

SEQ ID NO: 5887 - RNA, 20 nt, Artificial Sequence
  targeting sequence with TTCN PAM
accuccucauggaggggcaa

SEQ ID NO: 5888 - RNA, 20 nt, Artificial Sequence
  targeting sequence with TTCN PAM
uuggucuccuaaagcuccug

SEQ ID NO: 5889 - RNA, 20 nt, Artificial Sequence
  targeting sequence with TTCN PAM
guuuuguuucuuuggucucc

SEQ ID NO: 5890 - RNA, 20 nt, Artificial Sequence
  targeting sequence with TTCN PAM
uauggauguguauuuugugg

SEQ ID NO: 5891 - RNA, 20 nt, Artificial Sequence
  targeting sequence with TTCN PAM
agacucgcacacacacugag

SEQ ID NO: 5892 - RNA, 20 nt, Artificial Sequence
  targeting sequence with TTCN PAM
cugugugugcgaguacugug

SEQ ID NO: 5893 - RNA, 20 nt, Artificial Sequence
  targeting sequence with TTCN PAM
cacuccauaaucuuucaaag

SEQ ID NO: 5894 - RNA, 20 nt, Artificial Sequence
  targeting sequence with TTCN PAM
aagagguaaaaauauaaaua

SEQ ID NO: 5895 - RNA, 20 nt, Artificial Sequence
  targeting sequence with TTCN PAM
uaaacuauuuauauuuuuac

SEQ ID NO: 5896 - RNA, 20 nt, Artificial Sequence
  targeting sequence with TTCN PAM
gcaguauuucauaaacuauu

SEQ ID NO: 5897 - RNA, 20 nt, Artificial Sequence
  targeting sequence with TTCN PAM
guggcagcuuucggcaguau

SEQ ID NO: 5898 - RNA, 20 nt, Artificial Sequence
  targeting sequence with TTCN PAM
ccacuguaucuucaguggca

SEQ ID NO: 5899 - RNA, 20 nt, Artificial Sequence
  targeting sequence with TTCN PAM
guuccucaaacaacuguucu

SEQ ID NO: 5900 - RNA, 20 nt, Artificial Sequence
  targeting sequence with TTCN PAM
ucaaacaacuguucucaaau

SEQ ID NO: 5901 - RNA, 20 nt, Artificial Sequence
  targeting sequence with TTCN PAM
caaauaauggcuaacaccac

SEQ ID NO: 5902 - RNA, 20 nt, Artificial Sequence
  targeting sequence with TTCN PAM
gcuuagcauaggugguguua

SEQ ID NO: 5903 - RNA, 20 nt, Artificial Sequence
  targeting sequence with TTCN PAM
auauggguugauucugcuua

SEQ ID NO: 5904 - RNA, 20 nt, Artificial Sequence
  targeting sequence with TTCN PAM
uuugcuagaaaaaccagaau

SEQ ID NO: 5905 - RNA, 20 nt, Artificial Sequence
  targeting sequence with TTCN PAM
agcaaaugaaauaacuccuu

SEQ ID NO: 5906 - RNA, 20 nt, Artificial Sequence
  targeting sequence with TTCN PAM
gguuuuucuagcaaaugaaa

SEQ ID NO: 5907 - RNA, 20 nt, Artificial Sequence
  targeting sequence with TTCN PAM
uuacaaaauugucugaacuc

SEQ ID NO: 5908 - RNA, 20 nt, Artificial Sequence
  targeting sequence with TTCN PAM
gacaauuuuguaacgaaaau

SEQ ID NO: 5909 - RNA, 20 nt, Artificial Sequence
  targeting sequence with TTCN PAM
uccaaugucccuuuagagag

SEQ ID NO: 5910 - RNA, 20 nt, Artificial Sequence
  targeting sequence with TTCN PAM
cuaucagaaggaugcucugu

SEQ ID NO: 5911 - RNA, 20 nt, Artificial Sequence
  targeting sequence with TTCN PAM
gauagagaaaugcuuauuga

SEQ ID NO: 5912 - RNA, 20 nt, Artificial Sequence
  targeting sequence with TTCN PAM
ugccauuagaucuuccuagu

SEQ ID NO: 5913 - RNA, 20 nt, Artificial Sequence
  targeting sequence with TTCN PAM
uaguagcuucugggucugag

SEQ ID NO: 5914 - RNA, 20 nt, Artificial Sequence
  targeting sequence with TTCN PAM
gggucugaguuugcauucau

SEQ ID NO: 5915 - RNA, 20 nt, Artificial Sequence
  targeting sequence with TTCN PAM
ugccuuggcuucuaugccac

SEQ ID NO: 5916 - RNA, 20 nt, Artificial Sequence
  targeting sequence with TTCN PAM
augccacuaacuagcuguau

SEQ ID NO: 5917 - RNA, 20 nt, Artificial Sequence
  targeting sequence with TTCN PAM
gugccuuaguuuuugcaucc

SEQ ID NO: 5918 - RNA, 20 nt, Artificial Sequence
  targeting sequence with TTCN PAM
uccugucuauggaugcaaaa

SEQ ID NO: 5919 - RNA, 20 nt, Artificial Sequence
  targeting sequence with TTCN PAM
gugugcugugcuuuaaauuu

SEQ ID NO: 5920 - RNA, 20 nt, Artificial Sequence
  targeting sequence with TTCN PAM
guguuuucugugugcugugc

SEQ ID NO: 5921 - RNA, 20 nt, Artificial Sequence
  targeting sequence with TTCN PAM
ugggucuugucaugauagug

SEQ ID NO: 5922 - RNA, 20 nt, Artificial Sequence
  targeting sequence with TTCN PAM
gggagacaaaauggaaaaug

SEQ ID NO: 5923 - RNA, 20 nt, Artificial Sequence
  targeting sequence with TTCN PAM
auuuugucucccagaacuaa

SEQ ID NO: 5924 - RNA, 20 nt, Artificial Sequence
  targeting sequence with TTCN PAM
aauauauuucaaugauguaa

SEQ ID NO: 5925 - RNA, 20 nt, Artificial Sequence
  targeting sequence with TTCN PAM
augauguaauuuauaucugc

SEQ ID NO: 5926 - RNA, 20 nt, Artificial Sequence
  targeting sequence with TTCN PAM
ccagguauaaugagauaaug

SEQ ID NO: 5927 - RNA, 20 nt, Artificial Sequence
  targeting sequence with TTCN PAM
uuuugcacugaagaucagaa

SEQ ID NO: 5928 - RNA, 20 nt, Artificial Sequence
  targeting sequence with TTCN PAM
gugcaaaaugaaaauacuca

SEQ ID NO: 5929 - RNA, 20 nt, Artificial Sequence
  targeting sequence with TTCN PAM
gaucuucagugcaaaaugaa

SEQ ID NO: 5930 - RNA, 20 nt, Artificial Sequence
  targeting sequence with TTCN PAM
cgaaacuaggagacuccagc

SEQ ID NO: 5931 - RNA, 20 nt, Artificial Sequence
  targeting sequence with TTCN PAM
ugaaccugaccguucugauc

SEQ ID NO: 5932 - RNA, 20 nt, Artificial Sequence
  targeting sequence with TTCN PAM
acacaguagugguucaaauu

SEQ ID NO: 5933 - RNA, 20 nt, Artificial Sequence
  targeting sequence with TTCN PAM
aauuaaggugauaaaugagc

SEQ ID NO: 5934 - RNA, 20 nt, Artificial Sequence
  targeting sequence with TTCN PAM
gagcucauuuaucaccuuaa

SEQ ID NO: 5935 - RNA, 20 nt, Artificial Sequence
  targeting sequence with TTCN PAM
uuugggagaggugagagggu

SEQ ID NO: 5936 - RNA, 20 nt, Artificial Sequence
  targeting sequence with TTCN PAM
cuuauggcaaacuaguaaaa

SEQ ID NO: 5937 - RNA, 20 nt, Artificial Sequence
  targeting sequence with TTCN PAM
uguuaaacuuuauaauauuu

SEQ ID NO: 5938 - RNA, 20 nt, Artificial Sequence
  targeting sequence with TTCN PAM
acuacuugcuaguugaggug

SEQ ID NO: 5939 - RNA, 20 nt, Artificial Sequence
  targeting sequence with TTCN PAM
cauucgacuacuugcuaguu

SEQ ID NO: 5940 - RNA, 20 nt, Artificial Sequence
  targeting sequence with TTCN PAM
uuuacuugcuaauauaauua

SEQ ID NO: 5941 - RNA, 20 nt, Artificial Sequence
  targeting sequence with TTCN PAM
guaucucuucauucuaagau

SEQ ID NO: 5942 - RNA, 20 nt, Artificial Sequence
  targeting sequence with TTCN PAM
uucuaagauauguuaagcuu

SEQ ID NO: 5943 - RNA, 20 nt, Artificial Sequence
  targeting sequence with TTCN PAM
aagauauguuaagcuuacca

SEQ ID NO: 5944 - RNA, 20 nt, Artificial Sequence
  targeting sequence with TTCN PAM
uuugggaugagacaucugaa

SEQ ID NO: 5945 - RNA, 20 nt, Artificial Sequence
  targeting sequence with TTCN PAM
gaugucucaucccaaaggaa

SEQ ID NO: 5946 - RNA, 20 nt, Artificial Sequence
  targeting sequence with TTCN PAM
caauacaguggcguuacuug

SEQ ID NO: 5947 - RNA, 20 nt, Artificial Sequence
  targeting sequence with TTCN PAM
caaauucucgugcuugugcu

SEQ ID NO: 5948 - RNA, 20 nt, Artificial Sequence
  targeting sequence with TTCN PAM
cgugcuugugcugaacucca

SEQ ID NO: 5949 - RNA, 20 nt, Artificial Sequence
  targeting sequence with TTCN PAM
gcacaagcacgagaauuugg

SEQ ID NO: 5950 - RNA, 20 nt, Artificial Sequence
  targeting sequence with TTCN PAM
cugaugacagauacgucgau

SEQ ID NO: 5951 - RNA, 20 nt, Artificial Sequence
  targeting sequence with TTCN PAM
gacgacaacacuaacagcca

SEQ ID NO: 5952 - RNA, 20 nt, Artificial Sequence
  targeting sequence with TTCN PAM
uauuauuucugacgacaaca

SEQ ID NO: 5953 - RNA, 20 nt, Artificial Sequence
  targeting sequence with TTCN PAM
ucuucauauuauuucugacg

SEQ ID NO: 5954 - RNA, 20 nt, Artificial Sequence
  targeting sequence with TTCN PAM
uaauauucugggcuuuaauu

SEQ ID NO: 5955 - RNA, 20 nt, Artificial Sequence
  targeting sequence with TTCN PAM
gggcuuuaauuauuucucag

SEQ ID NO: 5956 - RNA, 20 nt, Artificial Sequence
  targeting sequence with TTCN PAM
cagugcuugacagaagaggu

SEQ ID NO: 5957 - RNA, 20 nt, Artificial Sequence
  targeting sequence with TTCN PAM
gucaagcacugagaaauaau

SEQ ID NO: 5958 - RNA, 20 nt, Artificial Sequence
  targeting sequence with TTCN PAM
aaaaccagucccuuuaugga

SEQ ID NO: 5959 - RNA, 20 nt, Artificial Sequence
  targeting sequence with TTCN PAM
cuguagguacugagugcuua

SEQ ID NO: 5960 - RNA, 20 nt, Artificial Sequence
  targeting sequence with TTCN PAM
cauuauacugaggcacguug

SEQ ID NO: 5961 - RNA, 20 nt, Artificial Sequence
  targeting sequence with TTCN PAM
ucaccacaacaguaucuuga

SEQ ID NO: 5962 - RNA, 20 nt, Artificial Sequence
  targeting sequence with TTCN PAM
ccacaacaguaucuugaguu

SEQ ID NO: 5963 - RNA, 20 nt, Artificial Sequence
  targeting sequence with TTCN PAM
ucauguacuggcagagguaa

SEQ ID NO: 5964 - RNA, 20 nt, Artificial Sequence
  targeting sequence with TTCN PAM
uguacuggcagagguaaggc

SEQ ID NO: 5965 - RNA, 20 nt, Artificial Sequence
  targeting sequence with TTCN PAM
gccuacuuugugauuuugag

SEQ ID NO: 5966 - RNA, 20 nt, Artificial Sequence
  targeting sequence with TTCN PAM
uuuaguccucaaaaucacaa

SEQ ID NO: 5967 - RNA, 20 nt, Artificial Sequence
  targeting sequence with TTCN PAM
cuuuuaauauuucauuuagu

SEQ ID NO: 5968 - RNA, 20 nt, Artificial Sequence
  targeting sequence with TTCN PAM
aaaguagaaaugugcuccac

SEQ ID NO: 5969 - RNA, 20 nt, Artificial Sequence
  targeting sequence with TTCN PAM
acuuuugaaaacauuuucac

SEQ ID NO: 5970 - RNA, 20 nt, Artificial Sequence
  targeting sequence with TTCN PAM
gcugcauguauaauuaauac

SEQ ID NO: 5971 - RNA, 20 nt, Artificial Sequence
  targeting sequence with TTCN PAM
cuauaauucagcugcaugua

SEQ ID NO: 5972 - RNA, 20 nt, Artificial Sequence
  targeting sequence with TTCN PAM
auauccaaggccccauuguc

SEQ ID NO: 5973 - RNA, 20 nt, Artificial Sequence
  targeting sequence with TTCN PAM
aacucuuccauauccaaggc

SEQ ID NO: 5974 - RNA, 20 nt, Artificial Sequence
  targeting sequence with TTCN PAM
acuucaaacucuuccauauc

SEQ ID NO: 5975 - RNA, 20 nt, Artificial Sequence
  targeting sequence with TTCN PAM
acauaguauccacacacaga

SEQ ID NO: 5976 - RNA, 20 nt, Artificial Sequence
  targeting sequence with TTCN PAM
cuuuaguguuaaaaaaacaa

SEQ ID NO: 5977 - RNA, 20 nt, Artificial Sequence
  targeting sequence with TTCN PAM
ucucagcuuucucuuuagug

SEQ ID NO: 5978 - RNA, 20 nt, Artificial Sequence
  targeting sequence with TTCN PAM
acuuaggcuuccucucagcu

SEQ ID NO: 5979 - RNA, 20 nt, Artificial Sequence
  targeting sequence with TTCN PAM
ugcuaagggagacagauuuu

SEQ ID NO: 5980 - RNA, 20 nt, Artificial Sequence
  targeting sequence with TTCN PAM
uuuccugcuaagggagacag

SEQ ID NO: 5981 - RNA, 20 nt, Artificial Sequence
  targeting sequence with TTCN PAM
ccuguguguaaacacauuac

SEQ ID NO: 5982 - RNA, 20 nt, Artificial Sequence
  targeting sequence with TTCN PAM
gacccagcucugcugguguc

SEQ ID NO: 5983 - RNA, 20 nt, Artificial Sequence
  targeting sequence with TTCN PAM
caggcaaggaguaaagcuca

SEQ ID NO: 5984 - RNA, 20 nt, Artificial Sequence
  targeting sequence with TTCN PAM
uccccauucucaggcaagga

SEQ ID NO: 5985 - RNA, 20 nt, Artificial Sequence
  targeting sequence with TTCN PAM
ucaaaauuaagcagcuucau

SEQ ID NO: 5986 - RNA, 20 nt, Artificial Sequence
  targeting sequence with TTCN PAM
uguauuuugaaucuaucaaa

SEQ ID NO: 5987 - RNA, 20 nt, Artificial Sequence
  targeting sequence with TTCN PAM
aaauacaugaaaugcuaaca

SEQ ID NO: 5988 - RNA, 20 nt, Artificial Sequence
  targeting sequence with TTCN PAM
uuuauuugauagauucaaaa

SEQ ID NO: 5989 - RNA, 20 nt, Artificial Sequence
  targeting sequence with TTCN PAM
cccauccaucguauuucuuu

SEQ ID NO: 5990 - RNA, 20 nt, Artificial Sequence
  targeting sequence with TTCN PAM
aacaggagaguugguuuugg

SEQ ID NO: 5991 - RNA, 20 nt, Artificial Sequence
  targeting sequence with TTCN PAM
acacuauucuaacaaaacaa

SEQ ID NO: 5992 - RNA, 20 nt, Artificial Sequence
  targeting sequence with TTCN PAM
aacaaaacaaccucgguaag

SEQ ID NO: 5993 - RNA, 20 nt, Artificial Sequence
  targeting sequence with TTCN PAM
ccauguugcccaaacugguc

SEQ ID NO: 5994 - RNA, 20 nt, Artificial Sequence
  targeting sequence with TTCN PAM
auacaaaauacaaaguuagc

SEQ ID NO: 5995 - RNA, 20 nt, Artificial Sequence
  targeting sequence with TTCN PAM
gugauccucccuccucagcc

SEQ ID NO: 5996 - RNA, 20 nt, Artificial Sequence
  targeting sequence with TTCN PAM
ggguuucagugauccucccu

SEQ ID NO: 5997 - RNA, 20 nt, Artificial Sequence
  targeting sequence with TTCN PAM
uuuucauuugaacaagagua

SEQ ID NO: 5998 - RNA, 20 nt, Artificial Sequence
  targeting sequence with TTCN PAM
uuugaacaagaguauuauau

SEQ ID NO: 5999 - RNA, 20 nt, Artificial Sequence
  targeting sequence with TTCN PAM
aaugaaaaggaaguuguuug

SEQ ID NO: 6000 - RNA, 20 nt, Artificial Sequence
  targeting sequence with TTCN PAM
guuuauaacagcacaacuuu

SEQ ID NO: 6001 - RNA, 20 nt, Artificial Sequence
  targeting sequence with TTCN PAM
ggcuguguuuucagcaucug

SEQ ID NO: 6002 - RNA, 20 nt, Artificial Sequence
  targeting sequence with TTCN PAM
gcaucugacuuaaaagaacc

SEQ ID NO: 6003 - RNA, 20 nt, Artificial Sequence
  targeting sequence with TTCN PAM
uuuaagucagaugcugaaaa

SEQ ID NO: 6004 - RNA, 20 nt, Artificial Sequence
  targeting sequence with TTCN PAM
cagccccagagaggaaguag

SEQ ID NO: 6005 - RNA, 20 nt, Artificial Sequence
  targeting sequence with TTCN PAM
ucucuggggcugugaacaag

SEQ ID NO: 6006 - RNA, 20 nt, Artificial Sequence
  targeting sequence with TTCN PAM
acuuccucucuggggcugug

SEQ ID NO: 6007 - RNA, 20 nt, Artificial Sequence
  targeting sequence with TTCN PAM
cuaaagguuuuugaaacccc

SEQ ID NO: 6008 - RNA, 20 nt, Artificial Sequence
  targeting sequence with TTCN PAM
aaaaccuuuagggaauaggu

SEQ ID NO: 6009 - RNA, 20 nt, Artificial Sequence
  targeting sequence with TTCN PAM
gacuggggaggggguuucaa

SEQ ID NO: 6010 - RNA, 20 nt, Artificial Sequence
  targeting sequence with TTCN PAM
cucuuaugacuuugucacua

SEQ ID NO: 6011 - RNA, 20 nt, Artificial Sequence
  targeting sequence with TTCN PAM
auggguuauuagacuaaauu

SEQ ID NO: 6012 - RNA, 20 nt, Artificial Sequence
  targeting sequence with TTCN PAM
uacaauuuagucuaauaacc

SEQ ID NO: 6013 - RNA, 20 nt, Artificial Sequence
  targeting sequence with TTCN PAM
ucauacaauuuagucuaaua

SEQ ID NO: 6014 - RNA, 20 nt, Artificial Sequence
  targeting sequence with TTCN PAM
uuggaguuaaauuaucuuua

SEQ ID NO: 6015 - RNA, 20 nt, Artificial Sequence
  targeting sequence with TTCN PAM
agucucuaugguacuacuac

SEQ ID NO: 6016 - RNA, 20 nt, Artificial Sequence
  targeting sequence with TTCN PAM
uaaaagucuaaguaguagua

SEQ ID NO: 6017 - RNA, 20 nt, Artificial Sequence
  targeting sequence with TTCN PAM
uuuuguaggugauaaauguu

SEQ ID NO: 6018 - RNA, 20 nt, Artificial Sequence
  targeting sequence with TTCN PAM
uagccgcuguguuucuuuuu

SEQ ID NO: 6019 - RNA, 20 nt, Artificial Sequence
  targeting sequence with TTCN PAM
acuagggauauaaaaguagu

SEQ ID NO: 6020 - RNA, 20 nt, Artificial Sequence
  targeting sequence with TTCN PAM
uccuaggggccagucggcaa

SEQ ID NO: 6021 - RNA, 20 nt, Artificial Sequence
  targeting sequence with TTCN PAM
gcucugcggcacaugaucag

SEQ ID NO: 6022 - RNA, 20 nt, Artificial Sequence
  targeting sequence with TTCN PAM
gaggcauucagcucugcggc

SEQ ID NO: 6023 - RNA, 20 nt, Artificial Sequence
  targeting sequence with TTCN PAM
ucugaggcauucagcucugc

SEQ ID NO: 6024 - RNA, 20 nt, Artificial Sequence
  targeting sequence with TTCN PAM
uugcugucacaagauauuga

SEQ ID NO: 6025 - RNA, 20 nt, Artificial Sequence
  targeting sequence with TTCN PAM
caauaucuugugacagcaag

SEQ ID NO: 6026 - RNA, 20 nt, Artificial Sequence
  targeting sequence with TTCN PAM
auccagacaaaaauugguuu

SEQ ID NO: 6027 - RNA, 20 nt, Artificial Sequence
  targeting sequence with TTCN PAM
auuuagcuguguuuuuaaaa

SEQ ID NO: 6028 - RNA, 20 nt, Artificial Sequence
  targeting sequence with TTCN PAM
uaaaaaauauauugacuccu

SEQ ID NO: 6029 - RNA, 20 nt, Artificial Sequence
  targeting sequence with TTCN PAM
auauagaaaguacuuguuaa

SEQ ID NO: 6030 - RNA, 20 nt, Artificial Sequence
  targeting sequence with TTCN PAM
auauggaaauaauauucuua

SEQ ID NO: 6031 - RNA, 20 nt, Artificial Sequence
  targeting sequence with TTCN PAM
caauaacuacuaaacaauua

SEQ ID NO: 6032 - RNA, 20 nt, Artificial Sequence
  targeting sequence with TTCN PAM
acugcuaucaaugaguaacu

SEQ ID NO: 6033 - RNA, 20 nt, Artificial Sequence
  targeting sequence with TTCN PAM
gaugagguggguauaguuac

SEQ ID NO: 6034 - RNA, 20 nt, Artificial Sequence
  targeting sequence with TTCN PAM
uacaaguaauauaauucaca

SEQ ID NO: 6035 - RNA, 20 nt, Artificial Sequence
  targeting sequence with TTCN PAM
caagauuuuuaggaagaaac

SEQ ID NO: 6036 - RNA, 20 nt, Artificial Sequence
  targeting sequence with TTCN PAM
uaaaaaucuugugaauuaua

SEQ ID NO: 6037 - RNA, 20 nt, Artificial Sequence
  targeting sequence with TTCN PAM
uccuaaaaaucuugugaauu

SEQ ID NO: 6038 - RNA, 20 nt, Artificial Sequence
  targeting sequence with TTCN PAM
auaugguauguuuuuuauga

SEQ ID NO: 6039 - RNA, 20 nt, Artificial Sequence
  targeting sequence with TTCN PAM
guauuaggaaaagauauuag

SEQ ID NO: 6040 - RNA, 20 nt, Artificial Sequence
  targeting sequence with TTCN PAM
uaauacagaagauuuauacu

SEQ ID NO: 6041 - RNA, 20 nt, Artificial Sequence
  targeting sequence with TTCN PAM
uaauaucuuuuccuaauaca

SEQ ID NO: 6042 - RNA, 20 nt, Artificial Sequence
  targeting sequence with TTCN PAM
acacuuuuguacaaaaggua

SEQ ID NO: 6043 - RNA, 20 nt, Artificial Sequence
  targeting sequence with TTCN PAM
uguucaacacuuuuguacaa

SEQ ID NO: 6044 - RNA, 20 nt, Artificial Sequence
  targeting sequence with TTCN PAM
gggacgucuuuguccaacag

SEQ ID NO: 6045 - RNA, 20 nt, Artificial Sequence
  targeting sequence with TTCN PAM
ucaguuacuggagguacuac

SEQ ID NO: 6046 - RNA, 20 nt, Artificial Sequence
  targeting sequence with TTCN PAM
ucuaaccaguuaaaaagccu

SEQ ID NO: 6047 - RNA, 20 nt, Artificial Sequence
  targeting sequence with TTCN PAM
uguaauuuuaucuuuccucu

SEQ ID NO: 6048 - RNA, 20 nt, Artificial Sequence
  targeting sequence with TTCN PAM
ucauguaauuuuaucuuucc

SEQ ID NO: 6049 - RNA, 20 nt, Artificial Sequence
  targeting sequence with TTCN PAM
uuuucuucauguaauuuuau

SEQ ID NO: 6050 - RNA, 20 nt, Artificial Sequence
  targeting sequence with TTCN PAM
uauggugguuuaccucaaau

SEQ ID NO: 6051 - RNA, 20 nt, Artificial Sequence
  targeting sequence with TTCN PAM
uuuuguucuuauggugguuu

SEQ ID NO: 6052 - RNA, 20 nt, Artificial Sequence
  targeting sequence with TTCN PAM
gauggacuuaugcuuugaag

SEQ ID NO: 6053 - RNA, 20 nt, Artificial Sequence
  targeting sequence with TTCN PAM
aagcauaaguccaucugaau

SEQ ID NO: 6054 - RNA, 20 nt, Artificial Sequence
  targeting sequence with TTCN PAM
guuuuugcucuucaaagcau

SEQ ID NO: 6055 - RNA, 20 nt, Artificial Sequence
  targeting sequence with TTCN PAM
agagaaagauugguaccaua

SEQ ID NO: 6056 - RNA, 20 nt, Artificial Sequence
  targeting sequence with TTCN PAM
cuggaagguaaaauggauaa

SEQ ID NO: 6057 - RNA, 20 nt, Artificial Sequence
  targeting sequence with TTCN PAM
uuuaauuauugcuaugguac

SEQ ID NO: 6058 - RNA, 20 nt, Artificial Sequence
  targeting sequence with TTCN PAM
guuccuagauuucagaguca

SEQ ID NO: 6059 - RNA, 20 nt, Artificial Sequence
  targeting sequence with TTCN PAM
uagauuucagagucaagggc

SEQ ID NO: 6060 - RNA, 20 nt, Artificial Sequence
  targeting sequence with TTCN PAM
gagucaagggcaucaauucu

SEQ ID NO: 6061 - RNA, 20 nt, Artificial Sequence
  targeting sequence with TTCN PAM
accgcugagucacauuuucu

SEQ ID NO: 6062 - RNA, 20 nt, Artificial Sequence
  targeting sequence with TTCN PAM
ccagagccaguaucucucug

SEQ ID NO: 6063 - RNA, 20 nt, Artificial Sequence
  targeting sequence with TTCN PAM
cuaaacaccccaccuuuuuu

SEQ ID NO: 6064 - RNA, 20 nt, Artificial Sequence
  targeting sequence with TTCN PAM
gaaucccucccuccacuacg

SEQ ID NO: 6065 - RNA, 20 nt, Artificial Sequence
  targeting sequence with TTCN PAM
gaaaugucuucccuaaacac

SEQ ID NO: 6066 - RNA, 20 nt, Artificial Sequence
  targeting sequence with TTCN PAM
ucacauaaucacagaugcaa

SEQ ID NO: 6067 - RNA, 20 nt, Artificial Sequence
  targeting sequence with TTCN PAM
cauaaucacagaugcaaaga

SEQ ID NO: 6068 - RNA, 20 nt, Artificial Sequence
  targeting sequence with TTCN PAM
uugcaucugugauuauguga

SEQ ID NO: 6069 - RNA, 20 nt, Artificial Sequence
  targeting sequence with TTCN PAM
agccccuaugccugugucug

SEQ ID NO: 6070 - RNA, 20 nt, Artificial Sequence
  targeting sequence with TTCN PAM
gucaggcuguugcuauccau

SEQ ID NO: 6071 - RNA, 20 nt, Artificial Sequence
  targeting sequence with TTCN PAM
cggcugagucgauaucaccg

SEQ ID NO: 6072 - RNA, 20 nt, Artificial Sequence
  targeting sequence with TTCN PAM
augaggcgucagcgggcucu

SEQ ID NO: 6073 - RNA, 20 nt, Artificial Sequence
  targeting sequence with TTCN PAM
aagcuuuccaugaggcguca

SEQ ID NO: 6074 - RNA, 20 nt, Artificial Sequence
  targeting sequence with TTCN PAM
aaacaaauaaaauguuuuuc

SEQ ID NO: 6075 - RNA, 20 nt, Artificial Sequence
  targeting sequence with TTCN PAM
ucuuucccucccaccccaac

SEQ ID NO: 6076 - RNA, 20 nt, Artificial Sequence
  targeting sequence with TTCN PAM
uucccucccaccccaacugu

SEQ ID NO: 6077 - RNA, 20 nt, Artificial Sequence
  targeting sequence with TTCN PAM
cucccaccccaacuguuuuu

SEQ ID NO: 6078 - RNA, 20 nt, Artificial Sequence
  targeting sequence with TTCN PAM
agggacuuguccaaaaacag

SEQ ID NO: 6079 - RNA, 20 nt, Artificial Sequence
  targeting sequence with TTCN PAM
ucugugaucuagauuuaaga

SEQ ID NO: 6080 - RNA, 20 nt, Artificial Sequence
  targeting sequence with TTCN PAM
uuuccucugaagaugguauu

SEQ ID NO: 6081 - RNA, 20 nt, Artificial Sequence
  targeting sequence with TTCN PAM
ucugaagaugguauucauac

SEQ ID NO: 6082 - RNA, 20 nt, Artificial Sequence
  targeting sequence with TTCN PAM
gaggaaacgaacuaaugaga

SEQ ID NO: 6083 - RNA, 20 nt, Artificial Sequence
  targeting sequence with TTCN PAM
uacuucugcaauauucccau

SEQ ID NO: 6084 - RNA, 20 nt, Artificial Sequence
  targeting sequence with TTCN PAM
gcaauauucccauccauccu

SEQ ID NO: 6085 - RNA, 20 nt, Artificial Sequence
  targeting sequence with TTCN PAM
cauccauccugucacaccca

SEQ ID NO: 6086 - RNA, 20 nt, Artificial Sequence
  targeting sequence with TTCN PAM
uuuucaaaguacuuuacaag

SEQ ID NO: 6087 - RNA, 20 nt, Artificial Sequence
  targeting sequence with TTCN PAM
aaguacuuuacaagauaaag

SEQ ID NO: 6088 - RNA, 20 nt, Artificial Sequence
  targeting sequence with TTCN PAM
auuuacggggggaggggggc

SEQ ID NO: 6089 - RNA, 20 nt, Artificial Sequence
  targeting sequence with TTCN PAM
ugucuauuugccccccuccc

SEQ ID NO: 6090 - RNA, 20 nt, Artificial Sequence
  targeting sequence with TTCN PAM
gucugaugcccagcugaugg

SEQ ID NO: 6091 - RNA, 20 nt, Artificial Sequence
  targeting sequence with TTCN PAM
cugagcaaauggcuuccaag

SEQ ID NO: 6092 - RNA, 20 nt, Artificial Sequence
  targeting sequence with TTCN PAM
aaguguauggccgccauucc

SEQ ID NO: 6093 - RNA, 20 nt, Artificial Sequence
  targeting sequence with TTCN PAM
cuucucuuucugccgccugc

SEQ ID NO: 6094 - RNA, 20 nt, Artificial Sequence
  targeting sequence with TTCN PAM
cuuucugccgccugcugucc

SEQ ID NO: 6095 - RNA, 20 nt, Artificial Sequence
  targeting sequence with TTCN PAM
gccgccugcuguccugccuu

SEQ ID NO: 6096 - RNA, 20 nt, Artificial Sequence
  targeting sequence with TTCN PAM
aaugcagauguuggcuuugc

SEQ ID NO: 6097 - RNA, 20 nt, Artificial Sequence
  targeting sequence with TTCN PAM
uagaaucuguauuuaguuca

SEQ ID NO: 6098 - RNA, 20 nt, Artificial Sequence
  targeting sequence with TTCN PAM
aggaauuacugcuucaaaug

SEQ ID NO: 6099 - RNA, 20 nt, Artificial Sequence
  targeting sequence with TTCN PAM
uugaggcacaaugccuccag

SEQ ID NO: 6100 - RNA, 20 nt, Artificial Sequence
  targeting sequence with TTCN PAM
uauaaacauuagcuggaggc

SEQ ID NO: 6101 - RNA, 20 nt, Artificial Sequence
  targeting sequence with TTCN PAM
caacaaauuggcuucuuaua

SEQ ID NO: 6102 - RNA, 20 nt, Artificial Sequence
  targeting sequence with TTCN PAM
aaguuuuccauguaguguca

SEQ ID NO: 6103 - RNA, 20 nt, Artificial Sequence
  targeting sequence with TTCN PAM
auguagugucagcuguuuga

SEQ ID NO: 6104 - RNA, 20 nt, Artificial Sequence
  targeting sequence with TTCN PAM
aacagcugacacuacaugga

SEQ ID NO: 6105 - RNA, 20 nt, Artificial Sequence
  targeting sequence with TTCN PAM
caagauugcuguuucaaaca

SEQ ID NO: 6106 - RNA, 20 nt, Artificial Sequence
  targeting sequence with TTCN PAM
uccaggggcguuaaguccuu

SEQ ID NO: 6107 - RNA, 20 nt, Artificial Sequence
  targeting sequence with TTCN PAM
agagagaaaaucccaacgca

SEQ ID NO: 6108 - RNA, 20 nt, Artificial Sequence
  targeting sequence with TTCN PAM
cucuagaaacacucccuuuu

SEQ ID NO: 6109 - RNA, 20 nt, Artificial Sequence
  targeting sequence with TTCN PAM
ggccugcuuuggucugcguu

SEQ ID NO: 6110 - RNA, 20 nt, Artificial Sequence
  targeting sequence with TTCN PAM
uggccuacccugguguuugg

SEQ ID NO: 6111 - RNA, 20 nt, Artificial Sequence
  targeting sequence with TTCN PAM
uauuaccugcaauuuaaaac

SEQ ID NO: 6112 - RNA, 20 nt, Artificial Sequence
  targeting sequence with TTCN PAM
ccagaaugguggccacagca

SEQ ID NO: 6113 - RNA, 20 nt, Artificial Sequence
  targeting sequence with TTCN PAM
ggagaaaacccuagacagug

SEQ ID NO: 6114 - RNA, 20 nt, Artificial Sequence
  targeting sequence with TTCN PAM
cucacauugcacuccaguaa

SEQ ID NO: 6115 - RNA, 20 nt, Artificial Sequence
  targeting sequence with TTCN PAM
uacuggagugcaaugugaga

SEQ ID NO: 6116 - RNA, 20 nt, Artificial Sequence
  targeting sequence with TTCN PAM
ggauuuucuuacuggagugc

SEQ ID NO: 6117 - RNA, 20 nt, Artificial Sequence
  targeting sequence with TTCN PAM
uucaggauuuucuuacugga

SEQ ID NO: 6118 - RNA, 20 nt, Artificial Sequence
  targeting sequence with TTCN PAM
cuuucuuucaggauuuucuu

SEQ ID NO: 6119 - RNA, 20 nt, Artificial Sequence
  targeting sequence with TTCN PAM
caccaccuuucucuuucuuu

SEQ ID NO: 6120 - RNA, 20 nt, Artificial Sequence
  targeting sequence with TTCN PAM
acaaccucaaccuucccaug

SEQ ID NO: 6121 - RNA, 20 nt, Artificial Sequence
  targeting sequence with TTCN PAM
gauacacgcugaaaauuuau

SEQ ID NO: 6122 - RNA, 20 nt, Artificial Sequence
  targeting sequence with TTCN PAM
gcguguaucugaagguaaag

SEQ ID NO: 6123 - RNA, 20 nt, Artificial Sequence
  targeting sequence with TTCN PAM
caauaaauuuucagcgugua

SEQ ID NO: 6124 - RNA, 20 nt, Artificial Sequence
  targeting sequence with TTCN PAM
gagagacaaaaaagccugca

SEQ ID NO: 6125 - RNA, 20 nt, Artificial Sequence
  targeting sequence with TTCN PAM
gacuacuaacaugaaggaua

SEQ ID NO: 6126 - RNA, 20 nt, Artificial Sequence
  targeting sequence with TTCN PAM
uuagaucaaucuguaagcaa

SEQ ID NO: 6127 - RNA, 20 nt, Artificial Sequence
  targeting sequence with TTCN PAM
uaguaaauauugcuuacaga

SEQ ID NO: 6128 - RNA, 20 nt, Artificial Sequence
  targeting sequence with TTCN PAM
uguuugaagaauuaaugauc

SEQ ID NO: 6129 - RNA, 20 nt, Artificial Sequence
  targeting sequence with TTCN PAM
uuauaaagaccaaucacuca

SEQ ID NO: 6130 - RNA, 20 nt, Artificial Sequence
  targeting sequence with TTCN PAM
uucuuuauaaagaccaauca

SEQ ID NO: 6131 - RNA, 20 nt, Artificial Sequence
  targeting sequence with TTCN PAM
ugauggaguuuauuauaguu

SEQ ID NO: 6132 - RNA, 20 nt, Artificial Sequence
  targeting sequence with TTCN PAM
uccugauggaguuuauuaua

SEQ ID NO: 6133 - RNA, 20 nt, Artificial Sequence
  targeting sequence with TTCN PAM
acauucuuccugauggaguu

SEQ ID NO: 6134 - RNA, 20 nt, Artificial Sequence
  targeting sequence with TTCN PAM
cugggauucuugagcauuag

SEQ ID NO: 6135 - RNA, 20 nt, Artificial Sequence
  targeting sequence with TTCN PAM
ugagcauuaggaauaccaag

SEQ ID NO: 6136 - RNA, 20 nt, Artificial Sequence
  targeting sequence with TTCN PAM
uaaugcucaagaaucccagu

SEQ ID NO: 6137 - RNA, 20 nt, Artificial Sequence
  targeting sequence with TTCN PAM
aacaaauuagaucacauuac

SEQ ID NO: 6138 - RNA, 20 nt, Artificial Sequence
  targeting sequence with TTCN PAM
uuuucaaacaaauuagauca

SEQ ID NO: 6139 - RNA, 20 nt, Artificial Sequence
  targeting sequence with TTCN PAM
gcaacagaccuguucuuuuu

SEQ ID NO: 6140 - RNA, 20 nt, Artificial Sequence
  targeting sequence with TTCN PAM
uucagcaacagaccuguucu

SEQ ID NO: 6141 - RNA, 20 nt, Artificial Sequence
  targeting sequence with TTCN PAM
cucuaaucuauuucauucag

SEQ ID NO: 6142 - RNA, 20 nt, Artificial Sequence
  targeting sequence with TTCN PAM
uguggucacugaauacuugc

SEQ ID NO: 6143 - RNA, 20 nt, Artificial Sequence
  targeting sequence with TTCN PAM
gugaccacaagaagagccug

SEQ ID NO: 6144 - RNA, 20 nt, Artificial Sequence
  targeting sequence with TTCN PAM
ggucacuccaaaaucaucuc

SEQ ID NO: 6145 - RNA, 20 nt, Artificial Sequence
  targeting sequence with TTCN PAM
ucacuguuucagugaagaga

SEQ ID NO: 6146 - RNA, 20 nt, Artificial Sequence
  targeting sequence with TTCN PAM
gugaagagaguuuaaaauag

SEQ ID NO: 6147 - RNA, 20 nt, Artificial Sequence
  targeting sequence with TTCN PAM
cugaaacagugaggaaauaa

SEQ ID NO: 6148 - RNA, 20 nt, Artificial Sequence
  targeting sequence with TTCN PAM
gcuuaaagucuauuuuaaac

SEQ ID NO: 6149 - RNA, 20 nt, Artificial Sequence
  targeting sequence with TTCN PAM
aguugaaauaaaaaggguua

SEQ ID NO: 6150 - RNA, 20 nt, Artificial Sequence
  targeting sequence with TTCN PAM
acuugaaauuauuguucugc

SEQ ID NO: 6151 - RNA, 20 nt, Artificial Sequence
  targeting sequence with TTCN PAM
uauaacccuuuuuauuucaa

SEQ ID NO: 6152 - RNA, 20 nt, Artificial Sequence
  targeting sequence with TTCN PAM
gcucuaaaucacuggaagag

SEQ ID NO: 6153 - RNA, 20 nt, Artificial Sequence
  targeting sequence with TTCN PAM
agugauuuagagcugaaguu

SEQ ID NO: 6154 - RNA, 20 nt, Artificial Sequence
  targeting sequence with TTCN PAM
uuuaauuaaaagacuccaac

SEQ ID NO: 6155 - RNA, 20 nt, Artificial Sequence
  targeting sequence with TTCN PAM
cguccuucagaacuaauaaa

SEQ ID NO: 6156 - RNA, 20 nt, Artificial Sequence
  targeting sequence with TTCN PAM
gaacuaauaaaauauucaac

SEQ ID NO: 6157 - RNA, 20 nt, Artificial Sequence
  targeting sequence with TTCN PAM
gaaggacgagaauugauaaa

SEQ ID NO: 6158 - RNA, 20 nt, Artificial Sequence
  targeting sequence with TTCN PAM
acuaaccacugacaagcauc

SEQ ID NO: 6159 - RNA, 20 nt, Artificial Sequence
  targeting sequence with TTCN PAM
aaaaguuuugaugcuuguca

SEQ ID NO: 6160 - RNA, 20 nt, Artificial Sequence
  targeting sequence with TTCN PAM
augguagcaauccauucuuc

SEQ ID NO: 6161 - RNA, 20 nt, Artificial Sequence
  targeting sequence with TTCN PAM
ucaguaucaacccuuuaaaa

SEQ ID NO: 6162 - RNA, 20 nt, Artificial Sequence
  targeting sequence with TTCN PAM
guaucaacccuuuaaaaaaa

SEQ ID NO: 6163 - RNA, 20 nt, Artificial Sequence
  targeting sequence with TTCN PAM
auuuuguuuauauggccauu

SEQ ID NO: 6164 - RNA, 20 nt, Artificial Sequence
  targeting sequence with TTCN PAM
caaacaaaagugaccaaucc

SEQ ID NO: 6165 - RNA, 20 nt, Artificial Sequence
  targeting sequence with TTCN PAM
uuuaaugucuggcauaggau

SEQ ID NO: 6166 - RNA, 20 nt, Artificial Sequence
  targeting sequence with TTCN PAM
uuuucagauaauaaagacug

SEQ ID NO: 6167 - RNA, 20 nt, Artificial Sequence
  targeting sequence with TTCN PAM
gauaauaaagacugagauca

SEQ ID NO: 6168 - RNA, 20 nt, Artificial Sequence
  targeting sequence with TTCN PAM
gcaccugguaaggugccugc

SEQ ID NO: 6169 - RNA, 20 nt, Artificial Sequence
  targeting sequence with TTCN PAM
ucauugguuuuaugguuuuu

SEQ ID NO: 6170 - RNA, 20 nt, Artificial Sequence
  targeting sequence with TTCN PAM
aaggcagagguccccaagcc

SEQ ID NO: 6171 - RNA, 20 nt, Artificial Sequence
  targeting sequence with TTCN PAM
acaaaagggaggguuggggg

SEQ ID NO: 6172 - RNA, 20 nt, Artificial Sequence
  targeting sequence with TTCN PAM
augaaaccacucccuguugc

SEQ ID NO: 6173 - RNA, 20 nt, Artificial Sequence
  targeting sequence with TTCN PAM
uggaagacaauuuuuccaca

SEQ ID NO: 6174 - RNA, 20 nt, Artificial Sequence
  targeting sequence with TTCN PAM
aaggcauuacucuggacaua

SEQ ID NO: 6175 - RNA, 20 nt, Artificial Sequence
  targeting sequence with TTCN PAM
cuguucaaaaaccuuucacg

SEQ ID NO: 6176 - RNA, 20 nt, Artificial Sequence
  targeting sequence with TTCN PAM
aaaaccuuucacgaucuccc

SEQ ID NO: 6177 - RNA, 20 nt, Artificial Sequence
  targeting sequence with TTCN PAM
aagauguacagaauuuauac

SEQ ID NO: 6178 - RNA, 20 nt, Artificial Sequence
  targeting sequence with TTCN PAM
aauugggcaaaaucauaucc

SEQ ID NO: 6179 - RNA, 20 nt, Artificial Sequence
  targeting sequence with TTCN PAM
guacaucuucgaauugggca

SEQ ID NO: 6180 - RNA, 20 nt, Artificial Sequence
  targeting sequence with TTCN PAM
caccugaguuucuucuuugu

SEQ ID NO: 6181 - RNA, 20 nt, Artificial Sequence
  targeting sequence with TTCN PAM
ucuuuguccguagauaaguu

SEQ ID NO: 6182 - RNA, 20 nt, Artificial Sequence
  targeting sequence with TTCN PAM
uuguccguagauaaguuuga

SEQ ID NO: 6183 - RNA, 20 nt, Artificial Sequence
  targeting sequence with TTCN PAM
aacuuaucuacggacaaaga

SEQ ID NO: 6184 - RNA, 20 nt, Artificial Sequence
  targeting sequence with TTCN PAM
uuuuucaaacuuaucuacgg

SEQ ID NO: 6185 - RNA, 20 nt, Artificial Sequence
  targeting sequence with TTCN PAM
auuccuuuuucaaacuuauc

SEQ ID NO: 6186 - RNA, 20 nt, Artificial Sequence
  targeting sequence with TTCN PAM
cucucuuagacuaaauuaaa

SEQ ID NO: 6187 - RNA, 20 nt, Artificial Sequence
  targeting sequence with TTCN PAM
uguuucccucucuuagacua

SEQ ID NO: 6188 - RNA, 20 nt, Artificial Sequence
  targeting sequence with TTCN PAM
cagaaguuuuauagauuauu

SEQ ID NO: 6189 - RNA, 20 nt, Artificial Sequence
  targeting sequence with TTCN PAM
gugaaaaauauccucuuuca

SEQ ID NO: 6190 - RNA, 20 nt, Artificial Sequence
  targeting sequence with TTCN PAM
uaacuguguaauaaucuaua

SEQ ID NO: 6191 - RNA, 20 nt, Artificial Sequence
  targeting sequence with TTCN PAM
uauauuguguguguaucaua

SEQ ID NO: 6192 - RNA, 20 nt, Artificial Sequence
  targeting sequence with TTCN PAM
auuuaaauuuuuaaaaaggu

SEQ ID NO: 6193 - RNA, 20 nt, Artificial Sequence
  targeting sequence with TTCN PAM
uaaccuuuuuaaaaauuuaa

SEQ ID NO: 6194 - RNA, 20 nt, Artificial Sequence
  targeting sequence with TTCN PAM
uuucuuuuaugaaauccucu

SEQ ID NO: 6195 - RNA, 20 nt, Artificial Sequence
  targeting sequence with TTCN PAM
uuuaugaaauccucucaaaa

SEQ ID NO: 6196 - RNA, 20 nt, Artificial Sequence
  targeting sequence with TTCN PAM
uaaaagaaaugaagacaaug

SEQ ID NO: 6197 - RNA, 20 nt, Artificial Sequence
  targeting sequence with TTCN PAM
acuacuuuuccuugaguacc

SEQ ID NO: 6198 - RNA, 20 nt, Artificial Sequence
  targeting sequence with TTCN PAM
uaauuuguaauaaaauauca

SEQ ID NO: 6199 - RNA, 20 nt, Artificial Sequence
  targeting sequence with TTCN PAM
uauuucuaacaauccaguua

SEQ ID NO: 6200 - RNA, 20 nt, Artificial Sequence
  targeting sequence with TTCN PAM
aacaauccaguuaguuacuu

SEQ ID NO: 6201 - RNA, 20 nt, Artificial Sequence
  targeting sequence with TTCN PAM
augaagcuaaagacaaaaca

SEQ ID NO: 6202 - RNA, 20 nt, Artificial Sequence
  targeting sequence with TTCN PAM
uugaaugcuguaaguaacua

SEQ ID NO: 6203 - RNA, 20 nt, Artificial Sequence
  targeting sequence with TTCN PAM
guuuuguuuugucuuuagcu

SEQ ID NO: 6204 - RNA, 20 nt, Artificial Sequence
  targeting sequence with TTCN PAM
ucauaaacuugagguucuca

SEQ ID NO: 6205 - RNA, 20 nt, Artificial Sequence
  targeting sequence with TTCN PAM
uaaacuugagguucucaucu

SEQ ID NO: 6206 - RNA, 20 nt, Artificial Sequence
  targeting sequence with TTCN PAM
caucucucaccaucuacaaa

SEQ ID NO: 6207 - RNA, 20 nt, Artificial Sequence
  targeting sequence with TTCN PAM
uuuguagauggugagagaug

SEQ ID NO: 6208 - RNA, 20 nt, Artificial Sequence
  targeting sequence with TTCN PAM
uaaaaauaauuauuaaucuu

SEQ ID NO: 6209 - RNA, 20 nt, Artificial Sequence
  targeting sequence with TTCN PAM
auuucauaaaaauaauuauu

SEQ ID NO: 6210 - RNA, 20 nt, Artificial Sequence
  targeting sequence with TTCN PAM
auaugugaaggacauuucua

SEQ ID NO: 6211 - RNA, 20 nt, Artificial Sequence
  targeting sequence with TTCN PAM
cuuuuuauaagugcuuuuua

SEQ ID NO: 6212 - RNA, 20 nt, Artificial Sequence
  targeting sequence with TTCN PAM
ccuuucucaaguuuugaacu

SEQ ID NO: 6213 - RNA, 20 nt, Artificial Sequence
  targeting sequence with TTCN PAM
caaguuuugaacuuuuaaaa

SEQ ID NO: 6214 - RNA, 20 nt, Artificial Sequence
  targeting sequence with TTCN PAM
aaacuugagaaaggggaauu

SEQ ID NO: 6215 - RNA, 20 nt, Artificial Sequence
  targeting sequence with TTCN PAM
cucuccucuuuuaaaaguuc

SEQ ID NO: 6216 - RNA, 20 nt, Artificial Sequence
  targeting sequence with TTCN PAM
uuugacauauaagauguuau

SEQ ID NO: 6217 - RNA, 20 nt, Artificial Sequence
  targeting sequence with TTCN PAM
uauaacaucuuauaugucaa

SEQ ID NO: 6218 - RNA, 20 nt, Artificial Sequence
  targeting sequence with TTCN PAM
uuaaaccauacccuuuuggg

SEQ ID NO: 6219 - RNA, 20 nt, Artificial Sequence
  targeting sequence with TTCN PAM
caaaaggguaugguuuaaug

SEQ ID NO: 6220 - RNA, 20 nt, Artificial Sequence
  targeting sequence with TTCN PAM
gguaaacugccaugugaagg

SEQ ID NO: 6221 - RNA, 20 nt, Artificial Sequence
  targeting sequence with TTCN PAM
cauggcaguuuaccugaauu

SEQ ID NO: 6222 - RNA, 20 nt, Artificial Sequence
  targeting sequence with TTCN PAM
uuuguccuucacauggcagu

SEQ ID NO: 6223 - RNA, 20 nt, Artificial Sequence
  targeting sequence with TTCN PAM
gaauuuagauccuuguccug

SEQ ID NO: 6224 - RNA, 20 nt, Artificial Sequence
  targeting sequence with TTCN PAM
gaacugucuacucaguccag

SEQ ID NO: 6225 - RNA, 20 nt, Artificial Sequence
  targeting sequence with TTCN PAM
ucuuuucugaaccuguuuuu

SEQ ID NO: 6226 - RNA, 20 nt, Artificial Sequence
  targeting sequence with TTCN PAM
uuucugaaccuguuuuucca

SEQ ID NO: 6227 - RNA, 20 nt, Artificial Sequence
  targeting sequence with TTCN PAM
gaaccuguuuuuccauccaa

SEQ ID NO: 6228 - RNA, 20 nt, Artificial Sequence
  targeting sequence with TTCN PAM
gaaaagaagaaguaugugcc

SEQ ID NO: 6229 - RNA, 20 nt, Artificial Sequence
  targeting sequence with TTCN PAM
auccaaaaaaugagaauaaa

SEQ ID NO: 6230 - RNA, 20 nt, Artificial Sequence
  targeting sequence with TTCN PAM
cauuuuuuggauggaaaaac

SEQ ID NO: 6231 - RNA, 20 nt, Artificial Sequence
  targeting sequence with TTCN PAM
cccuuagaauuuuuuauaug

SEQ ID NO: 6232 - RNA, 20 nt, Artificial Sequence
  targeting sequence with TTCN PAM
aagggggaauauccacgugg

SEQ ID NO: 6233 - RNA, 20 nt, Artificial Sequence
  targeting sequence with TTCN PAM
uaccugguauauucgagcag

SEQ ID NO: 6234 - RNA, 20 nt, Artificial Sequence
  targeting sequence with TTCN PAM
agcaggcauuuucuccacaa

SEQ ID NO: 6235 - RNA, 20 nt, Artificial Sequence
  targeting sequence with TTCN PAM
ccacaaacaguccuuucuuc

SEQ ID NO: 6236 - RNA, 20 nt, Artificial Sequence
  targeting sequence with TTCN PAM
ucucgccuuuuuuaaccagc

SEQ ID NO: 6237 - RNA, 20 nt, Artificial Sequence
  targeting sequence with TTCN PAM
cgccuuuuuuaaccagcuug

SEQ ID NO: 6238 - RNA, 20 nt, Artificial Sequence
  targeting sequence with TTCN PAM
uaccaagcugguuaaaaaag

SEQ ID NO: 6239 - RNA, 20 nt, Artificial Sequence
  targeting sequence with TTCN PAM
gccuauggggccgaggggau

SEQ ID NO: 6240 - RNA, 20 nt, Artificial Sequence
  targeting sequence with TTCN PAM
ccucagucauccccucggcc

SEQ ID NO: 6241 - RNA, 20 nt, Artificial Sequence
  targeting sequence with TTCN PAM
ggugaagauggagcugaccu

SEQ ID NO: 6242 - RNA, 20 nt, Artificial Sequence
  targeting sequence with TTCN PAM
ccagaaauuucaccucaguc

SEQ ID NO: 6243 - RNA, 20 nt, Artificial Sequence
  targeting sequence with TTCN PAM
aucucuuaggucagcuccau

SEQ ID NO: 6244 - RNA, 20 nt, Artificial Sequence
  targeting sequence with TTCN PAM
gauucuaucucuuaggucag

SEQ ID NO: 6245 - RNA, 20 nt, Artificial Sequence
  targeting sequence with TTCN PAM
auacauguauaauaaucaaa

SEQ ID NO: 6246 - RNA, 20 nt, Artificial Sequence
  targeting sequence with TTCN PAM
uaauuguuacauuaugauug

SEQ ID NO: 6247 - RNA, 20 nt, Artificial Sequence
  targeting sequence with TTCN PAM
aauuaguugggagaacugau

SEQ ID NO: 6248 - RNA, 20 nt, Artificial Sequence
  targeting sequence with TTCN PAM
cccaacuaauuagaaaguau

SEQ ID NO: 6249 - RNA, 20 nt, Artificial Sequence
  targeting sequence with TTCN PAM
auaaugucaaucaguucucc

SEQ ID NO: 6250 - RNA, 20 nt, Artificial Sequence
  targeting sequence with TTCN PAM
uuuugugcuuaaauguuaaa

SEQ ID NO: 6251 - RNA, 20 nt, Artificial Sequence
  targeting sequence with TTCN PAM
uccuucauauuauugugaga

SEQ ID NO: 6252 - RNA, 20 nt, Artificial Sequence
  targeting sequence with TTCN PAM
uucauauuauugugagauau

SEQ ID NO: 6253 - RNA, 20 nt, Artificial Sequence
  targeting sequence with TTCN PAM
uauuauugugagauaucuuu

SEQ ID NO: 6254 - RNA, 20 nt, Artificial Sequence
  targeting sequence with TTCN PAM
cagccauuaaaaaagcagug

SEQ ID NO: 6255 - RNA, 20 nt, Artificial Sequence
  targeting sequence with TTCN PAM
cugcuuuuuuaauggcuggg

SEQ ID NO: 6256 - RNA, 20 nt, Artificial Sequence
  targeting sequence with TTCN PAM
cacaugaaaaaguaaacacu

SEQ ID NO: 6257 - RNA, 20 nt, Artificial Sequence
  targeting sequence with TTCN PAM
ugugagaaauaugacuauau

SEQ ID NO: 6258 - RNA, 20 nt, Artificial Sequence
  targeting sequence with TTCN PAM
ugacccaauauauuaaaagg

SEQ ID NO: 6259 - RNA, 20 nt, Artificial Sequence
  targeting sequence with TTCN PAM
auucuagaaugaaauaacuu

SEQ ID NO: 6260 - RNA, 20 nt, Artificial Sequence
  targeting sequence with TTCN PAM
agaaugaaauaacuuacgug

SEQ ID NO: 6261 - RNA, 20 nt, Artificial Sequence
  targeting sequence with TTCN PAM
agaauugaaguguuuuguuu

SEQ ID NO: 6262 - RNA, 20 nt, Artificial Sequence
  targeting sequence with TTCN PAM
uucuagaauugaaguguuuu

SEQ ID NO: 6263 - RNA, 20 nt, Artificial Sequence
  targeting sequence with TTCN PAM
aaauauguaacaacuucuug

SEQ ID NO: 6264 - RNA, 20 nt, Artificial Sequence
  targeting sequence with TTCN PAM
ugccaagaaaauaaccauga

SEQ ID NO: 6265 - RNA, 20 nt, Artificial Sequence
  targeting sequence with TTCN PAM
uggcaagaaguuguuacaua

SEQ ID NO: 6266 - RNA, 20 nt, Artificial Sequence
  targeting sequence with TTCN PAM
auggugaugauguggucugu

SEQ ID NO: 6267 - RNA, 20 nt, Artificial Sequence
  targeting sequence with TTCN PAM
auguaauuugcugugugauu

SEQ ID NO: 6268 - RNA, 20 nt, Artificial Sequence
  targeting sequence with TTCN PAM
ugccguacaacgcugacucg

SEQ ID NO: 6269 - RNA, 20 nt, Artificial Sequence
  targeting sequence with TTCN PAM
uugguaauacuggggaguuc

SEQ ID NO: 6270 - RNA, 20 nt, Artificial Sequence
  targeting sequence with TTCN PAM
gaucagacacccuuugguag

SEQ ID NO: 6271 - RNA, 20 nt, Artificial Sequence
  targeting sequence with TTCN PAM
accaaagggugucugaucag

SEQ ID NO: 6272 - RNA, 20 nt, Artificial Sequence
  targeting sequence with TTCN PAM
aguaucuucggcgcacauca

SEQ ID NO: 6273 - RNA, 20 nt, Artificial Sequence
  targeting sequence with TTCN PAM
gcgcacaucaguguaugggu

SEQ ID NO: 6274 - RNA, 20 nt, Artificial Sequence
  targeting sequence with TTCN PAM
uaaugucuuguuauaaagca

SEQ ID NO: 6275 - RNA, 20 nt, Artificial Sequence
  targeting sequence with TTCN PAM
ugucuugacaaucuaaaaca

SEQ ID NO: 6276 - RNA, 20 nt, Artificial Sequence
  targeting sequence with TTCN PAM
augcuaagcaguacucuaaa

SEQ ID NO: 6277 - RNA, 20 nt, Artificial Sequence
  targeting sequence with TTCN PAM
guugugggccuagcuggauc

SEQ ID NO: 6278 - RNA, 20 nt, Artificial Sequence
  targeting sequence with TTCN PAM
aagugagagauccagcuagg

SEQ ID NO: 6279 - RNA, 20 nt, Artificial Sequence
  targeting sequence with TTCN PAM
cuaauuagucacaccucuac

SEQ ID NO: 6280 - RNA, 20 nt, Artificial Sequence
  targeting sequence with TTCN PAM
cuuauguagaggugugacua

SEQ ID NO: 6281 - RNA, 20 nt, Artificial Sequence
  targeting sequence with TTCN PAM
uuuucacuuauguagaggug

SEQ ID NO: 6282 - RNA, 20 nt, Artificial Sequence
  targeting sequence with TTCN PAM
gauuuccuuuucacuuaugu

SEQ ID NO: 6283 - RNA, 20 nt, Artificial Sequence
  targeting sequence with TTCN PAM
aaaacuauuuuuaagguuca

SEQ ID NO: 6284 - RNA, 20 nt, Artificial Sequence
  targeting sequence with TTCN PAM
auuucaguauucauuacuuu

SEQ ID NO: 6285 - RNA, 20 nt, Artificial Sequence
  targeting sequence with TTCN PAM
guauucauuacuuucucucu

SEQ ID NO: 6286 - RNA, 20 nt, Artificial Sequence
  targeting sequence with TTCN PAM
uuacuuucucucugaugcuc

SEQ ID NO: 6287 - RNA, 20 nt, Artificial Sequence
  targeting sequence with TTCN PAM
cucugaugcucauuucaucc

SEQ ID NO: 6288 - RNA, 20 nt, Artificial Sequence
  targeting sequence with TTCN PAM
uccuuuuaacuuacucccag

SEQ ID NO: 6289 - RNA, 20 nt, Artificial Sequence
  targeting sequence with TTCN PAM
auuaguuuuuuuauuuaucg

SEQ ID NO: 6290 - RNA, 20 nt, Artificial Sequence
  targeting sequence with TTCN PAM
ccuccaaagcauucauacuc

SEQ ID NO: 6291 - RNA, 20 nt, Artificial Sequence
  targeting sequence with TTCN PAM
uacuccagggucucgucauu

SEQ ID NO: 6292 - RNA, 20 nt, Artificial Sequence
  targeting sequence with TTCN PAM
ucuauaacugugucauuaaa

SEQ ID NO: 6293 - RNA, 20 nt, Artificial Sequence
  targeting sequence with TTCN PAM
auaacugugucauuaaauuu

SEQ ID NO: 6294 - RNA, 20 nt, Artificial Sequence
  targeting sequence with TTCN PAM
uuuuccacacccucuagaac

SEQ ID NO: 6295 - RNA, 20 nt, Artificial Sequence
  targeting sequence with TTCN PAM
acacccucuagaacccagag

SEQ ID NO: 6296 - RNA, 20 nt, Artificial Sequence
  targeting sequence with TTCN PAM
agaggguguggaaaaggaaa

SEQ ID NO: 6297 - RNA, 20 nt, Artificial Sequence
  targeting sequence with TTCN PAM
gcccuccccugcucuccguu

SEQ ID NO: 6298 - RNA, 20 nt, Artificial Sequence
  targeting sequence with TTCN PAM
ugaggcagcacuuacucacu

SEQ ID NO: 6299 - RNA, 20 nt, Artificial Sequence
  targeting sequence with TTCN PAM
uuaaggacaggcgguaagag

SEQ ID NO: 6300 - RNA, 20 nt, Artificial Sequence
  targeting sequence with TTCN PAM
uucauuaaggacaggcggua

SEQ ID NO: 6301 - RNA, 20 nt, Artificial Sequence
  targeting sequence with TTCN PAM
uaguuuucugugagggcaac

SEQ ID NO: 6302 - RNA, 20 nt, Artificial Sequence
  targeting sequence with TTCN PAM
gugagggcaaccuuuuuucg

SEQ ID NO: 6303 - RNA, 20 nt, Artificial Sequence
  targeting sequence with TTCN PAM
uggggauccuccaccgcccu

SEQ ID NO: 6304 - RNA, 20 nt, Artificial Sequence
  targeting sequence with TTCN PAM
cccauuuuccccaacuucag

SEQ ID NO: 6305 - RNA, 20 nt, Artificial Sequence
  targeting sequence with TTCN PAM
ccaacuucagaagaagaauc

SEQ ID NO: 6306 - RNA, 20 nt, Artificial Sequence
  targeting sequence with TTCN PAM
gaagaagaaucuuggcgagc

SEQ ID NO: 6307 - RNA, 20 nt, Artificial Sequence
  targeting sequence with TTCN PAM
gaaguuggggaaaaugggcg

SEQ ID NO: 6308 - RNA, 20 nt, Artificial Sequence
  targeting sequence with TTCN PAM
ucugaaguuggggaaaaugg

SEQ ID NO: 6309 - RNA, 20 nt, Artificial Sequence
  targeting sequence with TTCN PAM
ucuucugaaguuggggaaaa

SEQ ID NO: 6310 - RNA, 20 nt, Artificial Sequence
  targeting sequence with TTCN PAM
ugaaacuguguaaggcucca

SEQ ID NO: 6311 - RNA, 20 nt, Artificial Sequence
  targeting sequence with TTCN PAM
ggaauggcucgccaagauuc

SEQ ID NO: 6312 - RNA, 20 nt, Artificial Sequence
  targeting sequence with TTCN PAM
cuggaugcuaaacauggagc

SEQ ID NO: 6313 - RNA, 20 nt, Artificial Sequence
  targeting sequence with TTCN PAM
acauaguuucccuggaugcu

SEQ ID NO: 6314 - RNA, 20 nt, Artificial Sequence
  targeting sequence with TTCN PAM
uuuccucacucacuucuuuu

SEQ ID NO: 6315 - RNA, 20 nt, Artificial Sequence
  targeting sequence with TTCN PAM
caaccauucauuuccucacu

SEQ ID NO: 6316 - RNA, 20 nt, Artificial Sequence
  targeting sequence with TTCN PAM
ggaagaaaaaaaguuacccu

SEQ ID NO: 6317 - RNA, 20 nt, Artificial Sequence
  targeting sequence with TTCN PAM
ugaaauuuuucacaaccauu

SEQ ID NO: 6318 - RNA, 20 nt, Artificial Sequence
  targeting sequence with TTCN PAM
uccugaaauuuuucacaacc

SEQ ID NO: 6319 - RNA, 20 nt, Artificial Sequence
  targeting sequence with TTCN PAM
ucauauuuaauggagcgucc

SEQ ID NO: 6320 - RNA, 20 nt, Artificial Sequence
  targeting sequence with TTCN PAM
cagucaaacccaaaucucau

SEQ ID NO: 6321 - RNA, 20 nt, Artificial Sequence
  targeting sequence with TTCN PAM
ccuaaugagauuuggguuug

SEQ ID NO: 6322 - RNA, 20 nt, Artificial Sequence
  targeting sequence with TTCN PAM
cuguuauucucuaaagaaaa

SEQ ID NO: 6323 - RNA, 20 nt, Artificial Sequence
  targeting sequence with TTCN PAM
cuaaagaaaaaaaaaaggaa

SEQ ID NO: 6324 - RNA, 20 nt, Artificial Sequence
  targeting sequence with TTCN PAM
uuagagaauaacagugaaaa

SEQ ID NO: 6325 - RNA, 20 nt, Artificial Sequence
  targeting sequence with TTCN PAM
uuuuuuuuuucuuuagagaa

SEQ ID NO: 6326 - RNA, 20 nt, Artificial Sequence
  targeting sequence with TTCN PAM
gauuugcucuuuuuccuuuu

SEQ ID NO: 6327 - RNA, 20 nt, Artificial Sequence
  targeting sequence with TTCN PAM
uuacacuuuucacaguagua

SEQ ID NO: 6328 - RNA, 20 nt, Artificial Sequence
  targeting sequence with TTCN PAM
caguaguacgcauuacuucc

SEQ ID NO: 6329 - RNA, 20 nt, Artificial Sequence
  targeting sequence with TTCN PAM
uucuagaacuucuccucuaa

SEQ ID NO: 6330 - RNA, 20 nt, Artificial Sequence
  targeting sequence with TTCN PAM
agaacuucuccucuaacaaa

SEQ ID NO: 6331 - RNA, 20 nt, Artificial Sequence
  targeting sequence with TTCN PAM
agaaggaaguaaugcguacu

SEQ ID NO: 6332 - RNA, 20 nt, Artificial Sequence
  targeting sequence with TTCN PAM
ccucuaacaaauugguccaa

SEQ ID NO: 6333 - RNA, 20 nt, Artificial Sequence
  targeting sequence with TTCN PAM
uuggaccaauuuguuagagg

SEQ ID NO: 6334 - RNA, 20 nt, Artificial Sequence
  targeting sequence with TTCN PAM
aaacucugacaagaagucac

SEQ ID NO: 6335 - RNA, 20 nt, Artificial Sequence
  targeting sequence with TTCN PAM
ugucagaguuuggaaauuuc

SEQ ID NO: 6336 - RNA, 20 nt, Artificial Sequence
  targeting sequence with TTCN PAM
uggcucucaaucuaggagug

SEQ ID NO: 6337 - RNA, 20 nt, Artificial Sequence
  targeting sequence with TTCN PAM
ucacgcucauaucugauuag

SEQ ID NO: 6338 - RNA, 20 nt, Artificial Sequence
  targeting sequence with TTCN PAM
cgcucauaucugauuaggaa

SEQ ID NO: 6339 - RNA, 20 nt, Artificial Sequence
  targeting sequence with TTCN PAM
uaaucagauaugagcgugaa

SEQ ID NO: 6340 - RNA, 20 nt, Artificial Sequence
  targeting sequence with TTCN PAM
guuauuuccuaaucagauau

SEQ ID NO: 6341 - RNA, 20 nt, Artificial Sequence
  targeting sequence with TTCN PAM
auuguugauuguggguuuuc

SEQ ID NO: 6342 - RNA, 20 nt, Artificial Sequence
  targeting sequence with TTCN PAM
auuaucauaauaccuaagcu

SEQ ID NO: 6343 - RNA, 20 nt, Artificial Sequence
  targeting sequence with TTCN PAM
uaauugucacaaaguggcau

SEQ ID NO: 6344 - RNA, 20 nt, Artificial Sequence
  targeting sequence with TTCN PAM
uaauuuuaggcaauucuuaa

SEQ ID NO: 6345 - RNA, 20 nt, Artificial Sequence
  targeting sequence with TTCN PAM
augaauauuuucuuaagccc

SEQ ID NO: 6346 - RNA, 20 nt, Artificial Sequence
  targeting sequence with TTCN PAM
uugaaauucauaauuuuagg

SEQ ID NO: 6347 - RNA, 20 nt, Artificial Sequence
  targeting sequence with TTCN PAM
uaagcccacaaagaaauuuu

SEQ ID NO: 6348 - RNA, 20 nt, Artificial Sequence
  targeting sequence with TTCN PAM
uugugggcuuaagaaaauau

SEQ ID NO: 6349 - RNA, 20 nt, Artificial Sequence
  targeting sequence with TTCN PAM
ccuucuggaaguagaaagca

SEQ ID NO: 6350 - RNA, 20 nt, Artificial Sequence
  targeting sequence with TTCN PAM
ggaaguagaaagcaaagaaa

SEQ ID NO: 6351 - RNA, 20 nt, Artificial Sequence
  targeting sequence with TTCN PAM
agaaggagaaaaaauuucuu

SEQ ID NO: 6352 - RNA, 20 nt, Artificial Sequence
  targeting sequence with TTCN PAM
aagucucuuaacaaaugcaa

SEQ ID NO: 6353 - RNA, 20 nt, Artificial Sequence
  targeting sequence with TTCN PAM
aaaggaugaucauuuuuccu

SEQ ID NO: 6354 - RNA, 20 nt, Artificial Sequence
  targeting sequence with TTCN PAM
ugugucggugauaucuucac

SEQ ID NO: 6355 - RNA, 20 nt, Artificial Sequence
  targeting sequence with TTCN PAM
cucaccugugaggacagucu

SEQ ID NO: 6356 - RNA, 20 nt, Artificial Sequence
  targeting sequence with TTCN PAM
gaucagaguagaugcccuga

SEQ ID NO: 6357 - RNA, 20 nt, Artificial Sequence
  targeting sequence with TTCN PAM
gggcaucuacucugaucaga

SEQ ID NO: 6358 - RNA, 20 nt, Artificial Sequence
  targeting sequence with TTCN PAM
uaaaaauuuggucucucccc

SEQ ID NO: 6359 - RNA, 20 nt, Artificial Sequence
  targeting sequence with TTCN PAM
guuggaaugaaaaguuacag

SEQ ID NO: 6360 - RNA, 20 nt, Artificial Sequence
  targeting sequence with TTCN PAM
aacagaaaauggggagagac

SEQ ID NO: 6361 - RNA, 20 nt, Artificial Sequence
  targeting sequence with TTCN PAM
uuccaacagaaaauggggag

SEQ ID NO: 6362 - RNA, 20 nt, Artificial Sequence
  targeting sequence with TTCN PAM
ggaggcaucacuuaaaacug

SEQ ID NO: 6363 - RNA, 20 nt, Artificial Sequence
  targeting sequence with TTCN PAM
guauacucauaaguucagga

SEQ ID NO: 6364 - RNA, 20 nt, Artificial Sequence
  targeting sequence with TTCN PAM
gguaguaucagcugugguga

SEQ ID NO: 6365 - RNA, 20 nt, Artificial Sequence
  targeting sequence with TTCN PAM
ugcaccucagccucccgagu

SEQ ID NO: 6366 - RNA, 20 nt, Artificial Sequence
  targeting sequence with TTCN PAM
cucuaacucccucaaacucu

SEQ ID NO: 6367 - RNA, 20 nt, Artificial Sequence
  targeting sequence with TTCN PAM
uccaucugaucaaugagacu

SEQ ID NO: 6368 - RNA, 20 nt, Artificial Sequence
  targeting sequence with TTCN PAM
uuacuagucucauugaucag

SEQ ID NO: 6369 - RNA, 20 nt, Artificial Sequence
  targeting sequence with TTCN PAM
uaugcauccugcuguucucu

SEQ ID NO: 6370 - RNA, 20 nt, Artificial Sequence
  targeting sequence with TTCN PAM
cucacauaaaguucuuuauu

SEQ ID NO: 6371 - RNA, 20 nt, Artificial Sequence
  targeting sequence with TTCN PAM
uuauuccacaucuugaaaau

SEQ ID NO: 6372 - RNA, 20 nt, Artificial Sequence
  targeting sequence with TTCN PAM
acaucuugaaaaucuauaua

SEQ ID NO: 6373 - RNA, 20 nt, Artificial Sequence
  targeting sequence with TTCN PAM
agauguggaauaaagaacuu

SEQ ID NO: 6374 - RNA, 20 nt, Artificial Sequence
  targeting sequence with TTCN PAM
uuuaaaaacauuuaauuuuu

SEQ ID NO: 6375 - RNA, 20 nt, Artificial Sequence
  targeting sequence with TTCN PAM
gaaugugguagaaagggaac

SEQ ID NO: 6376 - RNA, 20 nt, Artificial Sequence
  targeting sequence with TTCN PAM
accacauucagaaauugcua

SEQ ID NO: 6377 - RNA, 20 nt, Artificial Sequence
  targeting sequence with TTCN PAM
cuuucuaccacauucagaaa

SEQ ID NO: 6378 - RNA, 20 nt, Artificial Sequence
  targeting sequence with TTCN PAM
uguucccuuucuaccacauu

SEQ ID NO: 6379 - RNA, 20 nt, Artificial Sequence
  targeting sequence with TTCN PAM
cuauuaggauguggacauuu

SEQ ID NO: 6380 - RNA, 20 nt, Artificial Sequence
  targeting sequence with TTCN PAM
agugaagugagacuagcuug

SEQ ID NO: 6381 - RNA, 20 nt, Artificial Sequence
  targeting sequence with TTCN PAM
uuauuuaaagacauuaguga

SEQ ID NO: 6382 - RNA, 20 nt, Artificial Sequence
  targeting sequence with TTCN PAM
cuaaugucuuuaaauaaaga

SEQ ID NO: 6383 - RNA, 20 nt, Artificial Sequence
  targeting sequence with TTCN PAM
ccugacccugugccgauuuc

SEQ ID NO: 6384 - RNA, 20 nt, Artificial Sequence
  targeting sequence with TTCN PAM
uaucauuccccugacccugu

SEQ ID NO: 6385 - RNA, 20 nt, Artificial Sequence
  targeting sequence with TTCN PAM
aagaacuaaaauaagaauca

SEQ ID NO: 6386 - RNA, 20 nt, Artificial Sequence
  targeting sequence with TTCN PAM
uugaaauauuuguucauauc

SEQ ID NO: 6387 - RNA, 20 nt, Artificial Sequence
  targeting sequence with TTCN PAM
uauuuuaguucuuugaaaua

SEQ ID NO: 6388 - RNA, 20 nt, Artificial Sequence
  targeting sequence with TTCN PAM
aaauaauuaagaugagcaaa

SEQ ID NO: 6389 - RNA, 20 nt, Artificial Sequence
  targeting sequence with TTCN PAM
uaggaauugaaugacuauuc

SEQ ID NO: 6390 - RNA, 20 nt, Artificial Sequence
  targeting sequence with TTCN PAM
uaggaauuugcucaucuuaa

SEQ ID NO: 6391 - RNA, 20 nt, Artificial Sequence
  targeting sequence with TTCN PAM
auuccuaggaauuugcucau

SEQ ID NO: 6392 - RNA, 20 nt, Artificial Sequence
  targeting sequence with TTCN PAM
caacauucuaaugauuugaa

SEQ ID NO: 6393 - RNA, 20 nt, Artificial Sequence
  targeting sequence with TTCN PAM
cccaguaacucuugagauuu

SEQ ID NO: 6394 - RNA, 20 nt, Artificial Sequence
  targeting sequence with TTCN PAM
aaaaauucucagguacauag

SEQ ID NO: 6395 - RNA, 20 nt, Artificial Sequence
  targeting sequence with TTCN PAM
cagguacauaguacugcagc

SEQ ID NO: 6396 - RNA, 20 nt, Artificial Sequence
  targeting sequence with TTCN PAM
auuaaauguccaaagagaga

SEQ ID NO: 6397 - RNA, 20 nt, Artificial Sequence
  targeting sequence with TTCN PAM
guggaugaugacacagacaa

SEQ ID NO: 6398 - RNA, 20 nt, Artificial Sequence
  targeting sequence with TTCN PAM
gugcagucauuacuuucagu

SEQ ID NO: 6399 - RNA, 20 nt, Artificial Sequence
  targeting sequence with TTCN PAM
uuucugugcagucauuacuu

SEQ ID NO: 6400 - RNA, 20 nt, Artificial Sequence
  targeting sequence with TTCN PAM
agcuugauauguuucuuuuc

SEQ ID NO: 6401 - RNA, 20 nt, Artificial Sequence
  targeting sequence with TTCN PAM
cuacaggaaauaagcguagc

SEQ ID NO: 6402 - RNA, 20 nt, Artificial Sequence
  targeting sequence with TTCN PAM
uguagagaaccugguauuac

SEQ ID NO: 6403 - RNA, 20 nt, Artificial Sequence
  targeting sequence with TTCN PAM
auguguacugggcuacgcuu

SEQ ID NO: 6404 - RNA, 20 nt, Artificial Sequence
  targeting sequence with TTCN PAM
aaaauacuaaaacugucagu

SEQ ID NO: 6405 - RNA, 20 nt, Artificial Sequence
  targeting sequence with TTCN PAM
auaaaguuacugacaguuuu

SEQ ID NO: 6406 - RNA, 20 nt, Artificial Sequence
  targeting sequence with TTCN PAM
aaaaucacauuaggucaagu

SEQ ID NO: 6407 - RNA, 20 nt, Artificial Sequence
  targeting sequence with TTCN PAM
ggagcuacuaaagaauugca

SEQ ID NO: 6408 - RNA, 20 nt, Artificial Sequence
  targeting sequence with TTCN PAM
uuaguagcuccugaaaugug

SEQ ID NO: 6409 - RNA, 20 nt, Artificial Sequence
  targeting sequence with TTCN PAM
auccuuuuugguacgauaga

SEQ ID NO: 6410 - RNA, 20 nt, Artificial Sequence
  targeting sequence with TTCN PAM
uuuuucuauccuuuuuggua

SEQ ID NO: 6411 - RNA, 20 nt, Artificial Sequence
  targeting sequence with TTCN PAM
agcagcuguauaugcaaccu

SEQ ID NO: 6412 - RNA, 20 nt, Artificial Sequence
  targeting sequence with TTCN PAM
uauaacaaguugcaccacca

SEQ ID NO: 6413 - RNA, 20 nt, Artificial Sequence
  targeting sequence with TTCN PAM
cagccccacaaacccugaac

SEQ ID NO: 6414 - RNA, 20 nt, Artificial Sequence
  targeting sequence with TTCN PAM
ggguuuguggggcugagaaa

SEQ ID NO: 6415 - RNA, 20 nt, Artificial Sequence
  targeting sequence with TTCN PAM
cccaguggauagcaggucca

SEQ ID NO: 6416 - RNA, 20 nt, Artificial Sequence
  targeting sequence with TTCN PAM
aguaccuucccccaguggau

SEQ ID NO: 6417 - RNA, 20 nt, Artificial Sequence
  targeting sequence with TTCN PAM
ucucuuuuccaguaccuucc

SEQ ID NO: 6418 - RNA, 20 nt, Artificial Sequence
  targeting sequence with TTCN PAM
auuccucucuuuuccaguac

SEQ ID NO: 6419 - RNA, 20 nt, Artificial Sequence
  targeting sequence with TTCN PAM
ccucugcuguuucuauuccu

SEQ ID NO: 6420 - RNA, 20 nt, Artificial Sequence
  targeting sequence with TTCN PAM
ucuccucugcuguuucuauu

SEQ ID NO: 6421 - RNA, 20 nt, Artificial Sequence
  targeting sequence with TTCN PAM
uaacaugcuggauggguaaa

SEQ ID NO: 6422 - RNA, 20 nt, Artificial Sequence
  targeting sequence with TTCN PAM
ugaaguaccucugcagaugc

SEQ ID NO: 6423 - RNA, 20 nt, Artificial Sequence
  targeting sequence with TTCN PAM
ugaacauagguuuugccagc

SEQ ID NO: 6424 - RNA, 20 nt, Artificial Sequence
  targeting sequence with TTCN PAM
acaaauauugauuaaauacc

SEQ ID NO: 6425 - RNA, 20 nt, Artificial Sequence
  targeting sequence with TTCN PAM
aucugccaggcacugugcau

SEQ ID NO: 6426 - RNA, 20 nt, Artificial Sequence
  targeting sequence with TTCN PAM
ugguaaucacuucguagacu

SEQ ID NO: 6427 - RNA, 20 nt, Artificial Sequence
  targeting sequence with TTCN PAM
uuuuagagaagguaacauuc

SEQ ID NO: 6428 - RNA, 20 nt, Artificial Sequence
  targeting sequence with TTCN PAM
cuaaaaggaauuacaauaug

SEQ ID NO: 6429 - RNA, 20 nt, Artificial Sequence
  targeting sequence with TTCN PAM
acauggcacuucuucaagug

SEQ ID NO: 6430 - RNA, 20 nt, Artificial Sequence
  targeting sequence with TTCN PAM
ucaaguggaaaaggauacug

SEQ ID NO: 6431 - RNA, 20 nt, Artificial Sequence
  targeting sequence with TTCN PAM
aguggaaaaggauacuguaa

SEQ ID NO: 6432 - RNA, 20 nt, Artificial Sequence
  targeting sequence with TTCN PAM
acuugaagaagugccauguu

SEQ ID NO: 6433 - RNA, 20 nt, Artificial Sequence
  targeting sequence with TTCN PAM
aaguguaaaauuacaguauc

SEQ ID NO: 6434 - RNA, 20 nt, Artificial Sequence
  targeting sequence with TTCN PAM
uuaacaucagacauauacuu

SEQ ID NO: 6435 - RNA, 20 nt, Artificial Sequence
  targeting sequence with TTCN PAM
aagaccuaauuaacaccgaa

SEQ ID NO: 6436 - RNA, 20 nt, Artificial Sequence
  targeting sequence with TTCN PAM
guguuaauuaggucuuagaa

SEQ ID NO: 6437 - RNA, 20 nt, Artificial Sequence
  targeting sequence with TTCN PAM
aacuuaugagagcccacauu

SEQ ID NO: 6438 - RNA, 20 nt, Artificial Sequence
  targeting sequence with TTCN PAM
aaccuauuuuuucagugacu

SEQ ID NO: 6439 - RNA, 20 nt, Artificial Sequence
  targeting sequence with TTCN PAM
caguaaaaaguagcauucca

SEQ ID NO: 6440 - RNA, 20 nt, Artificial Sequence
  targeting sequence with TTCN PAM
aguugcuugguaguuauucu

SEQ ID NO: 6441 - RNA, 20 nt, Artificial Sequence
  targeting sequence with TTCN PAM
uaauauauucaguauauuag

SEQ ID NO: 6442 - RNA, 20 nt, Artificial Sequence
  targeting sequence with TTCN PAM
guauauuagagugauacuau

SEQ ID NO: 6443 - RNA, 20 nt, Artificial Sequence
  targeting sequence with TTCN PAM
aaaaaaauuaaguucaucaa

SEQ ID NO: 6444 - RNA, 20 nt, Artificial Sequence
  targeting sequence with TTCN PAM
ucaacgucuagaaaaccuac

SEQ ID NO: 6445 - RNA, 20 nt, Artificial Sequence
  targeting sequence with TTCN PAM
agacguugaugaacuuaauu

SEQ ID NO: 6446 - RNA, 20 nt, Artificial Sequence
  targeting sequence with TTCN PAM
augcaucaccagccugaccc

SEQ ID NO: 6447 - RNA, 20 nt, Artificial Sequence
  targeting sequence with TTCN PAM
uuuauaauaauuugaagauu

SEQ ID NO: 6448 - RNA, 20 nt, Artificial Sequence
  targeting sequence with TTCN PAM
aauuauuauaaaagaacugc

SEQ ID NO: 6449 - RNA, 20 nt, Artificial Sequence
  targeting sequence with TTCN PAM
aaucuucaaauuauuauaaa

SEQ ID NO: 6450 - RNA, 20 nt, Artificial Sequence
  targeting sequence with TTCN PAM
ccuucaaaucuucaaauuau

SEQ ID NO: 6451 - RNA, 20 nt, Artificial Sequence
  targeting sequence with TTCN PAM
uaggcugccaaucggcuauu

SEQ ID NO: 6452 - RNA, 20 nt, Artificial Sequence
  targeting sequence with TTCN PAM
cuguacuacaccuagaaaca

SEQ ID NO: 6453 - RNA, 20 nt, Artificial Sequence
  targeting sequence with TTCN PAM
agguguaguacagcgaauag

SEQ ID NO: 6454 - RNA, 20 nt, Artificial Sequence
  targeting sequence with TTCN PAM
acaaugaauaaucuacuuaa

SEQ ID NO: 6455 - RNA, 20 nt, Artificial Sequence
  targeting sequence with TTCN PAM
uuguugaaauugacuugugu

SEQ ID NO: 6456 - RNA, 20 nt, Artificial Sequence
  targeting sequence with TTCN PAM
acuguugauuuaguuuaaug

SEQ ID NO: 6457 - RNA, 20 nt, Artificial Sequence
  targeting sequence with TTCN PAM
uuucaacuguugauuuaguu

SEQ ID NO: 6458 - RNA, 20 nt, Artificial Sequence
  targeting sequence with TTCN PAM
acuuucauuucaacuguuga

SEQ ID NO: 6459 - RNA, 20 nt, Artificial Sequence
  targeting sequence with TTCN PAM
ucaaacauacuuaagucagg

SEQ ID NO: 6460 - RNA, 20 nt, Artificial Sequence
  targeting sequence with TTCN PAM
uaggaugacagcgauaaaau

SEQ ID NO: 6461 - RNA, 20 nt, Artificial Sequence
  targeting sequence with TTCN PAM
uuugcugccauccuaagauc

SEQ ID NO: 6462 - RNA, 20 nt, Artificial Sequence
  targeting sequence with TTCN PAM
ggguuuuacagcuuucuuuu

SEQ ID NO: 6463 - RNA, 20 nt, Artificial Sequence
  targeting sequence with TTCN PAM
uaaccagugaucccucagua

SEQ ID NO: 6464 - RNA, 20 nt, Artificial Sequence
  targeting sequence with TTCN PAM
guguauccuuccuaaccagu

SEQ ID NO: 6465 - RNA, 20 nt, Artificial Sequence
  targeting sequence with TTCN PAM
cucagagguuggcuauccuc

SEQ ID NO: 6466 - RNA, 20 nt, Artificial Sequence
  targeting sequence with TTCN PAM
cuaaguguuucacucagagg

SEQ ID NO: 6467 - RNA, 20 nt, Artificial Sequence
  targeting sequence with TTCN PAM
uaucugaacuucaggguugc

SEQ ID NO: 6468 - RNA, 20 nt, Artificial Sequence
  targeting sequence with TTCN PAM
gauaagaagcaaaggacagu

SEQ ID NO: 6469 - RNA, 20 nt, Artificial Sequence
  targeting sequence with TTCN PAM
ggguugcaaaggacaguaag

SEQ ID NO: 6470 - RNA, 20 nt, Artificial Sequence
  targeting sequence with TTCN PAM
uacuguccuuugcaacccug

SEQ ID NO: 6471 - RNA, 20 nt, Artificial Sequence
  targeting sequence with TTCN PAM
uuucuuacuguccuuugcaa

SEQ ID NO: 6472 - RNA, 20 nt, Artificial Sequence
  targeting sequence with TTCN PAM
guguauuuuaaaucucuuuc

SEQ ID NO: 6473 - RNA, 20 nt, Artificial Sequence
  targeting sequence with TTCN PAM
uccuugaagguuuugguggg

SEQ ID NO: 6474 - RNA, 20 nt, Artificial Sequence
  targeting sequence with TTCN PAM
uugaagguuuuggugggaaa

SEQ ID NO: 6475 - RNA, 20 nt, Artificial Sequence
  targeting sequence with TTCN PAM
aggaagaaagagauuuaaaa

SEQ ID NO: 6476 - RNA, 20 nt, Artificial Sequence
  targeting sequence with TTCN PAM
caccaaaaccuucaaggaag

SEQ ID NO: 6477 - RNA, 20 nt, Artificial Sequence
  targeting sequence with TTCN PAM
cagucuuuucccaccaaaac

SEQ ID NO: 6478 - RNA, 20 nt, Artificial Sequence
  targeting sequence with TTCN PAM
guacaauggggagggaugaa

SEQ ID NO: 6479 - RNA, 20 nt, Artificial Sequence
  targeting sequence with TTCN PAM
ucccuccccauuguacugaa

SEQ ID NO: 6480 - RNA, 20 nt, Artificial Sequence
  targeting sequence with TTCN PAM
uuuuuuaaucaaggcacugu

SEQ ID NO: 6481 - RNA, 20 nt, Artificial Sequence
  targeting sequence with TTCN PAM
uaccuaaaacagauuuugcu

SEQ ID NO: 6482 - RNA, 20 nt, Artificial Sequence
  targeting sequence with TTCN PAM
cuacuuaaaguugccucauu

SEQ ID NO: 6483 - RNA, 20 nt, Artificial Sequence
  targeting sequence with TTCN PAM
acaaaauacugcuuauuaug

SEQ ID NO: 6484 - RNA, 20 nt, Artificial Sequence
  targeting sequence with TTCN PAM
auaaccacugaaauuguaca

SEQ ID NO: 6485 - RNA, 20 nt, Artificial Sequence
  targeting sequence with TTCN PAM
gugguuauugaaauggacaa

SEQ ID NO: 6486 - RNA, 20 nt, Artificial Sequence
  targeting sequence with TTCN PAM
uguacaauuucagugguuau

SEQ ID NO: 6487 - RNA, 20 nt, Artificial Sequence
  targeting sequence with TTCN PAM
cuauaaacagcaaauaguuu

SEQ ID NO: 6488 - RNA, 20 nt, Artificial Sequence
  targeting sequence with TTCN PAM
ucaggauuacucaauuaacu

SEQ ID NO: 6489 - RNA, 20 nt, Artificial Sequence
  targeting sequence with TTCN PAM
ggauuacucaauuaacucug

SEQ ID NO: 6490 - RNA, 20 nt, Artificial Sequence
  targeting sequence with TTCN PAM
ugagaaaggaacaaaguuag

SEQ ID NO: 6491 - RNA, 20 nt, Artificial Sequence
  targeting sequence with TTCN PAM
caugaaaaccagaguuaauu

SEQ ID NO: 6492 - RNA, 20 nt, Artificial Sequence
  targeting sequence with TTCN PAM
uuucucaugaaaaccagagu

SEQ ID NO: 6493 - RNA, 20 nt, Artificial Sequence
  targeting sequence with TTCN PAM
uuugcuccaaaucuaacuaa

SEQ ID NO: 6494 - RNA, 20 nt, Artificial Sequence
  targeting sequence with TTCN PAM
uccuaccuccaagaguauaa

SEQ ID NO: 6495 - RNA, 20 nt, Artificial Sequence
  targeting sequence with TTCN PAM
aauuuguacccauaaaacua

SEQ ID NO: 6496 - RNA, 20 nt, Artificial Sequence
  targeting sequence with TTCN PAM
aaaauuacuacuguaauaaa

SEQ ID NO: 6497 - RNA, 20 nt, Artificial Sequence
  targeting sequence with TTCN PAM
ucauuuaguggauaauauag

SEQ ID NO: 6498 - RNA, 20 nt, Artificial Sequence
  targeting sequence with TTCN PAM
uuuaguggauaauauaggau

SEQ ID NO: 6499 - RNA, 20 nt, Artificial Sequence
  targeting sequence with TTCN PAM
aucugugagucuguguaucc

SEQ ID NO: 6500 - RNA, 20 nt, Artificial Sequence
  targeting sequence with TTCN PAM
gucccaaaagauuuuguuaa

SEQ ID NO: 6501 - RNA, 20 nt, Artificial Sequence
  targeting sequence with TTCN PAM
aauuagaauuuuuaccaaaa

SEQ ID NO: 6502 - RNA, 20 nt, Artificial Sequence
  targeting sequence with TTCN PAM
aauuugaaacuucaguccca

SEQ ID NO: 6503 - RNA, 20 nt, Artificial Sequence
  targeting sequence with TTCN PAM
guuuugguaaaaauucuaau

SEQ ID NO: 6504 - RNA, 20 nt, Artificial Sequence
  targeting sequence with TTCN PAM
auacuuuggaugaaaguccu

SEQ ID NO: 6505 - RNA, 20 nt, Artificial Sequence
  targeting sequence with TTCN PAM
uccaaaguauggaaaaugca

SEQ ID NO: 6506 - RNA, 20 nt, Artificial Sequence
  targeting sequence with TTCN PAM
ccagcuggcagugccgccau

SEQ ID NO: 6507 - RNA, 20 nt, Artificial Sequence
  targeting sequence with TTCN PAM
agaagcucggaaaaggaagu

SEQ ID NO: 6508 - RNA, 20 nt, Artificial Sequence
  targeting sequence with TTCN PAM
agaauuauuuuaaauaguca

SEQ ID NO: 6509 - RNA, 20 nt, Artificial Sequence
  targeting sequence with TTCN PAM
gagcuucuagaauuauuuua

SEQ ID NO: 6510 - RNA, 20 nt, Artificial Sequence
  targeting sequence with TTCN PAM
uuuuccgagcuucuagaauu

SEQ ID NO: 6511 - RNA, 20 nt, Artificial Sequence
  targeting sequence with TTCN PAM
ucacucauuaaaccauuguu

SEQ ID NO: 6512 - RNA, 20 nt, Artificial Sequence
  targeting sequence with TTCN PAM
agguucaucacucauuaaac

SEQ ID NO: 6513 - RNA, 20 nt, Artificial Sequence
  targeting sequence with TTCN PAM
uguugaagaugaacacauau

SEQ ID NO: 6514 - RNA, 20 nt, Artificial Sequence
  targeting sequence with TTCN PAM
acaugaauauuaugcucuau

SEQ ID NO: 6515 - RNA, 20 nt, Artificial Sequence
  targeting sequence with TTCN PAM
ucuucaacaugaauauuaug

SEQ ID NO: 6516 - RNA, 20 nt, Artificial Sequence
  targeting sequence with TTCN PAM
aagauccuaucuugcacuuu

SEQ ID NO: 6517 - RNA, 20 nt, Artificial Sequence
  targeting sequence with TTCN PAM
cuguauuguaagcccauaaa

SEQ ID NO: 6518 - RNA, 20 nt, Artificial Sequence
  targeting sequence with TTCN PAM
cuuuagaaacagaagugcca

SEQ ID NO: 6519 - RNA, 20 nt, Artificial Sequence
  targeting sequence with TTCN PAM
aaagugaaagcuugacuccu

SEQ ID NO: 6520 - RNA, 20 nt, Artificial Sequence
  targeting sequence with TTCN PAM
guuucuaaagugaaagcuug

SEQ ID NO: 6521 - RNA, 20 nt, Artificial Sequence
  targeting sequence with TTCN PAM
gccuugugguguccuuggca

SEQ ID NO: 6522 - RNA, 20 nt, Artificial Sequence
  targeting sequence with TTCN PAM
cucucugguuaagaaucacu

SEQ ID NO: 6523 - RNA, 20 nt, Artificial Sequence
  targeting sequence with TTCN PAM
uaaccagagagagaaaggca

SEQ ID NO: 6524 - RNA, 20 nt, Artificial Sequence
  targeting sequence with TTCN PAM
auguauccccaguagccaag

SEQ ID NO: 6525 - RNA, 20 nt, Artificial Sequence
  targeting sequence with TTCN PAM
uggcuacuggggauacauag

SEQ ID NO: 6526 - RNA, 20 nt, Artificial Sequence
  targeting sequence with TTCN PAM
uuugucuucugaauacaauu

SEQ ID NO: 6527 - RNA, 20 nt, Artificial Sequence
  targeting sequence with TTCN PAM
ccuaggguacacauguaauu

SEQ ID NO: 6528 - RNA, 20 nt, Artificial Sequence
  targeting sequence with TTCN PAM
gaugagaaucacccuuaaaa

SEQ ID NO: 6529 - RNA, 20 nt, Artificial Sequence
  targeting sequence with TTCN PAM
caucugaagaggcagccccu

SEQ ID NO: 6530 - RNA, 20 nt, Artificial Sequence
  targeting sequence with TTCN PAM
uuuaagggugauucucaucu

SEQ ID NO: 6531 - RNA, 20 nt, Artificial Sequence
  targeting sequence with TTCN PAM
uacugugugaagggucaauu

SEQ ID NO: 6532 - RNA, 20 nt, Artificial Sequence
  targeting sequence with TTCN PAM
cacaguaggaaauuguccgu

SEQ ID NO: 6533 - RNA, 20 nt, Artificial Sequence
  targeting sequence with TTCN PAM
auggaacacuuggcaucuau

SEQ ID NO: 6534 - RNA, 20 nt, Artificial Sequence
  targeting sequence with TTCN PAM
auggaaaauugacccuucac

SEQ ID NO: 6535 - RNA, 20 nt, Artificial Sequence
  targeting sequence with TTCN PAM
cacuuacacacaguacuggc

SEQ ID NO: 6536 - RNA, 20 nt, Artificial Sequence
  targeting sequence with TTCN PAM
gugcucgguuauugccagua

SEQ ID NO: 6537 - RNA, 20 nt, Artificial Sequence
  targeting sequence with TTCN PAM
ucagugcucgguuauugcca

SEQ ID NO: 6538 - RNA, 20 nt, Artificial Sequence
  targeting sequence with TTCN PAM
uuuucugccccacagaguga

SEQ ID NO: 6539 - RNA, 20 nt, Artificial Sequence
  targeting sequence with TTCN PAM
gccccacagagugaaagaag

SEQ ID NO: 6540 - RNA, 20 nt, Artificial Sequence
  targeting sequence with TTCN PAM
cucuguggggcagaaaagga

SEQ ID NO: 6541 - RNA, 20 nt, Artificial Sequence
  targeting sequence with TTCN PAM
uucacucuguggggcagaaa

SEQ ID NO: 6542 - RNA, 20 nt, Artificial Sequence
  targeting sequence with TTCN PAM
cuggucucacauucagcugu

SEQ ID NO: 6543 - RNA, 20 nt, Artificial Sequence
  targeting sequence with TTCN PAM
gcuguacgauuagguucaaa

SEQ ID NO: 6544 - RNA, 20 nt, Artificial Sequence
  targeting sequence with TTCN PAM
aaguuauccagccaaguaau

SEQ ID NO: 6545 - RNA, 20 nt, Artificial Sequence
  targeting sequence with TTCN PAM
agcaucguagcugggcugau

SEQ ID NO: 6546 - RNA, 20 nt, Artificial Sequence
  targeting sequence with TTCN PAM
gaagcuaagaaggaaaaaaa

SEQ ID NO: 6547 - RNA, 20 nt, Artificial Sequence
  targeting sequence with TTCN PAM
gaaauggagcaguuaaggau

SEQ ID NO: 6548 - RNA, 20 nt, Artificial Sequence
  targeting sequence with TTCN PAM
uagcuucagaaauggagcag

SEQ ID NO: 6549 - RNA, 20 nt, Artificial Sequence
  targeting sequence with TTCN PAM
uucuuagcuucagaaaugga

SEQ ID NO: 6550 - RNA, 20 nt, Artificial Sequence
  targeting sequence with TTCN PAM
uuguaauggauuuuuuuuuu

SEQ ID NO: 6551 - RNA, 20 nt, Artificial Sequence
  targeting sequence with TTCN PAM
uucuuuguaauggauuuuuu

SEQ ID NO: 6552 - RNA, 20 nt, Artificial Sequence
  targeting sequence with TTCN PAM
ccugccucagccucccgagu

SEQ ID NO: 6553 - RNA, 20 nt, Artificial Sequence
  targeting sequence with TTCN PAM
agcaauucuccugccucagc

SEQ ID NO: 6554 - RNA, 20 nt, Artificial Sequence
  targeting sequence with TTCN PAM
uggguucaagcaauucuccu

SEQ ID NO: 6555 - RNA, 20 nt, Artificial Sequence
  targeting sequence with TTCN PAM
uaagugucugucaaaaacag

SEQ ID NO: 6556 - RNA, 20 nt, Artificial Sequence
  targeting sequence with TTCN PAM
ucaguuucguaagugucugu

SEQ ID NO: 6557 - RNA, 20 nt, Artificial Sequence
  targeting sequence with TTCN PAM
uuuagacuuaggugcuggga

SEQ ID NO: 6558 - RNA, 20 nt, Artificial Sequence
  targeting sequence with TTCN PAM
cagcaccuaagucuaaaaga

SEQ ID NO: 6559 - RNA, 20 nt, Artificial Sequence
  targeting sequence with TTCN PAM
uuugagaaacuauucuauuu

SEQ ID NO: 6560 - RNA, 20 nt, Artificial Sequence
  targeting sequence with TTCN PAM
caaaagaagcaaaucucuuu

SEQ ID NO: 6561 - RNA, 20 nt, Artificial Sequence
  targeting sequence with TTCN PAM
auuucuucuuacaggguauu

SEQ ID NO: 6562 - RNA, 20 nt, Artificial Sequence
  targeting sequence with TTCN PAM
ucuuacaggguauuugaaca

SEQ ID NO: 6563 - RNA, 20 nt, Artificial Sequence
  targeting sequence with TTCN PAM
uacaggguauuugaacaacu

SEQ ID NO: 6564 - RNA, 20 nt, Artificial Sequence
  targeting sequence with TTCN PAM
aauacccuguaagaagaaau

SEQ ID NO: 6565 - RNA, 20 nt, Artificial Sequence
  targeting sequence with TTCN PAM
uuuuuaccucuggccuucag

SEQ ID NO: 6566 - RNA, 20 nt, Artificial Sequence
  targeting sequence with TTCN PAM
gagguauuuuuuuuccuccu

SEQ ID NO: 6567 - RNA, 20 nt, Artificial Sequence
  targeting sequence with TTCN PAM
uccuggucuugacguucuuu

SEQ ID NO: 6568 - RNA, 20 nt, Artificial Sequence
  targeting sequence with TTCN PAM
uuaccaauugcuauuuuugu

SEQ ID NO: 6569 - RNA, 20 nt, Artificial Sequence
  targeting sequence with TTCN PAM
uguaagcugaagcaaauucu

SEQ ID NO: 6570 - RNA, 20 nt, Artificial Sequence
  targeting sequence with TTCN PAM
gcuuacaggaaauuaauaaa

SEQ ID NO: 6571 - RNA, 20 nt, Artificial Sequence
  targeting sequence with TTCN PAM
uugugaagagcggagaauaa

SEQ ID NO: 6572 - RNA, 20 nt, Artificial Sequence
  targeting sequence with TTCN PAM
caaagaauuugcuucagcuu

SEQ ID NO: 6573 - RNA, 20 nt, Artificial Sequence
  targeting sequence with TTCN PAM
ccgcucuucacaaagaauuu

SEQ ID NO: 6574 - RNA, 20 nt, Artificial Sequence
  targeting sequence with TTCN PAM
gaucaugaguuuguuauucu

SEQ ID NO: 6575 - RNA, 20 nt, Artificial Sequence
  targeting sequence with TTCN PAM
aaaguacauuuacauuauuu

SEQ ID NO: 6576 - RNA, 20 nt, Artificial Sequence
  targeting sequence with TTCN PAM
cuccgguguagucuguuaua

SEQ ID NO: 6577 - RNA, 20 nt, Artificial Sequence
  targeting sequence with TTCN PAM
caauaguuucguaucagugu

SEQ ID NO: 6578 - RNA, 20 nt, Artificial Sequence
  targeting sequence with TTCN PAM
uaucaguguaauuaaaauau

SEQ ID NO: 6579 - RNA, 20 nt, Artificial Sequence
  targeting sequence with TTCN PAM
caauucauuaaugacugguu

SEQ ID NO: 6580 - RNA, 20 nt, Artificial Sequence
  targeting sequence with TTCN PAM
uuaaugacugguuauguaac

SEQ ID NO: 6581 - RNA, 20 nt, Artificial Sequence
  targeting sequence with TTCN PAM
ccagccccucuccccuacau

SEQ ID NO: 6582 - RNA, 20 nt, Artificial Sequence
  targeting sequence with TTCN PAM
guuuuuuagacuguuaucuc

SEQ ID NO: 6583 - RNA, 20 nt, Artificial Sequence
  targeting sequence with TTCN PAM
guuacuaauaagaggcugau

SEQ ID NO: 6584 - RNA, 20 nt, Artificial Sequence
  targeting sequence with TTCN PAM
aaucagccucuuauuaguaa

SEQ ID NO: 6585 - RNA, 20 nt, Artificial Sequence
  targeting sequence with TTCN PAM
uuguaagaacaaauucauaa

SEQ ID NO: 6586 - RNA, 20 nt, Artificial Sequence
  targeting sequence with TTCN PAM
uacaaggaaaaugcuuuuua

SEQ ID NO: 6587 - RNA, 20 nt, Artificial Sequence
  targeting sequence with TTCN PAM
uaaaacaagugagcaagaua

SEQ ID NO: 6588 - RNA, 20 nt, Artificial Sequence
  targeting sequence with TTCN PAM
auauuuuagcaagaagcaua

SEQ ID NO: 6589 - RNA, 20 nt, Artificial Sequence
  targeting sequence with TTCN PAM
ugcuaaaauauggaauuuga

SEQ ID NO: 6590 - RNA, 20 nt, Artificial Sequence
  targeting sequence with TTCN PAM
guuacuauaucuguauuagu

SEQ ID NO: 6591 - RNA, 20 nt, Artificial Sequence
  targeting sequence with TTCN PAM
cucucuuuacaccguuauuu

SEQ ID NO: 6592 - RNA, 20 nt, Artificial Sequence
  targeting sequence with TTCN PAM
cuuuuaacuuuuaguuuucu

SEQ ID NO: 6593 - RNA, 20 nt, Artificial Sequence
  targeting sequence with TTCN PAM
aacuucuaaaaugcuuacua

SEQ ID NO: 6594 - RNA, 20 nt, Artificial Sequence
  targeting sequence with TTCN PAM
aaaaugcuuacuauaguauu

SEQ ID NO: 6595 - RNA, 20 nt, Artificial Sequence
  targeting sequence with TTCN PAM
aauacuauaguaagcauuuu

SEQ ID NO: 6596 - RNA, 20 nt, Artificial Sequence
  targeting sequence with TTCN PAM
auauguuuguguauaugcgu

SEQ ID NO: 6597 - RNA, 20 nt, Artificial Sequence
  targeting sequence with TTCN PAM
uuuaauccucagacuggccu

SEQ ID NO: 6598 - RNA, 20 nt, Artificial Sequence
  targeting sequence with TTCN PAM
gcuuaaaucuugaugguaaa

SEQ ID NO: 6599 - RNA, 20 nt, Artificial Sequence
  targeting sequence with TTCN PAM
gccaaaacuuaaaaauuaug

SEQ ID NO: 6600 - RNA, 20 nt, Artificial Sequence
  targeting sequence with TTCN PAM
uagacaucuggaauguuaaa

SEQ ID NO: 6601 - RNA, 20 nt, Artificial Sequence
  targeting sequence with TTCN PAM
agaugucuaagaaagaaguc

SEQ ID NO: 6602 - RNA, 20 nt, Artificial Sequence
  targeting sequence with TTCN PAM
guuuuaacauuccagauguc

SEQ ID NO: 6603 - RNA, 20 nt, Artificial Sequence
  targeting sequence with TTCN PAM
aaauaauauuuauguagaag

SEQ ID NO: 6604 - RNA, 20 nt, Artificial Sequence
  targeting sequence with TTCN PAM
acauaaauauuauuuugaaa

SEQ ID NO: 6605 - RNA, 20 nt, Artificial Sequence
  targeting sequence with TTCN PAM
ggccccuguaucccggcuuc

SEQ ID NO: 6606 - RNA, 20 nt, Artificial Sequence
  targeting sequence with TTCN PAM
ugacuuuuuuuaauaccucu

SEQ ID NO: 6607 - RNA, 20 nt, Artificial Sequence
  targeting sequence with TTCN PAM
uugauccauucuugacuuuu

SEQ ID NO: 6608 - RNA, 20 nt, Artificial Sequence
  targeting sequence with TTCN PAM
cucugguuucuuugauccau

SEQ ID NO: 6609 - RNA, 20 nt, Artificial Sequence
  targeting sequence with TTCN PAM
aauuuucccucugguuucuu

SEQ ID NO: 6610 - RNA, 20 nt, Artificial Sequence
  targeting sequence with TTCN PAM
uuugucuuaauauauuuucu

SEQ ID NO: 6611 - RNA, 20 nt, Artificial Sequence
  targeting sequence with TTCN PAM
uuugauauuucccauaauuu

SEQ ID NO: 6612 - RNA, 20 nt, Artificial Sequence
  targeting sequence with TTCN PAM
aucucauaacacuucuuuug

SEQ ID NO: 6613 - RNA, 20 nt, Artificial Sequence
  targeting sequence with TTCN PAM
aaaaaccagcuccucgauuc

SEQ ID NO: 6614 - RNA, 20 nt, Artificial Sequence
  targeting sequence with TTCN PAM
cugauuuuuugaaggguucu

SEQ ID NO: 6615 - RNA, 20 nt, Artificial Sequence
  targeting sequence with TTCN PAM
aaaaaucagugaaucgagga

SEQ ID NO: 6616 - RNA, 20 nt, Artificial Sequence
  targeting sequence with TTCN PAM
ucgugucucuaucuucuuca

SEQ ID NO: 6617 - RNA, 20 nt, Artificial Sequence
  targeting sequence with TTCN PAM
ugucucuaucuucuucaguu

SEQ ID NO: 6618 - RNA, 20 nt, Artificial Sequence
  targeting sequence with TTCN PAM
ucaguucugcucugaucuua

SEQ ID NO: 6619 - RNA, 20 nt, Artificial Sequence
  targeting sequence with TTCN PAM
guucugcucugaucuuaguu

SEQ ID NO: 6620 - RNA, 20 nt, Artificial Sequence
  targeting sequence with TTCN PAM
gcucugaucuuaguuauuuu

SEQ ID NO: 6621 - RNA, 20 nt, Artificial Sequence
  targeting sequence with TTCN PAM
gcuagcuuuugaauuuguuu

SEQ ID NO: 6622 - RNA, 20 nt, Artificial Sequence
  targeting sequence with TTCN PAM
aaagcuagcagaaggcaaaa

SEQ ID NO: 6623 - RNA, 20 nt, Artificial Sequence
  targeting sequence with TTCN PAM
cuaguucuuuuaauugugau

SEQ ID NO: 6624 - RNA, 20 nt, Artificial Sequence
  targeting sequence with TTCN PAM
uuuaauugugauguuagggu

SEQ ID NO: 6625 - RNA, 20 nt, Artificial Sequence
  targeting sequence with TTCN PAM
ugcuuucuccugugggcauu

SEQ ID NO: 6626 - RNA, 20 nt, Artificial Sequence
  targeting sequence with TTCN PAM
ccugugggcauuuagugcua

SEQ ID NO: 6627 - RNA, 20 nt, Artificial Sequence
  targeting sequence with TTCN PAM
gguacguugugucuuuguuc

SEQ ID NO: 6628 - RNA, 20 nt, Artificial Sequence
  targeting sequence with TTCN PAM
cauugguuucaaauaacuua

SEQ ID NO: 6629 - RNA, 20 nt, Artificial Sequence
  targeting sequence with TTCN PAM
aauaacuuauuuauuucugc

SEQ ID NO: 6630 - RNA, 20 nt, Artificial Sequence
  targeting sequence with TTCN PAM
gccuuaauuucauuauuuac

SEQ ID NO: 6631 - RNA, 20 nt, Artificial Sequence
  targeting sequence with TTCN PAM
uuauuuacccaguagucauu

SEQ ID NO: 6632 - RNA, 20 nt, Artificial Sequence
  targeting sequence with TTCN PAM
ggagcagguuguucaguuuc

SEQ ID NO: 6633 - RNA, 20 nt, Artificial Sequence
  targeting sequence with TTCN PAM
guuuccauguaguugugcga

SEQ ID NO: 6634 - RNA, 20 nt, Artificial Sequence
  targeting sequence with TTCN PAM
auguaguugugcgauuuuga

SEQ ID NO: 6635 - RNA, 20 nt, Artificial Sequence
  targeting sequence with TTCN PAM
cucaaaaucgcacaacuaca

SEQ ID NO: 6636 - RNA, 20 nt, Artificial Sequence
  targeting sequence with TTCN PAM
uaauccugaguucuaauuug

SEQ ID NO: 6637 - RNA, 20 nt, Artificial Sequence
  targeting sequence with TTCN PAM
acaccacauugcacuuacuc

SEQ ID NO: 6638 - RNA, 20 nt, Artificial Sequence
  targeting sequence with TTCN PAM
uuucaacaccacauugcacu

SEQ ID NO: 6639 - RNA, 20 nt, Artificial Sequence
  targeting sequence with TTCN PAM
guugauuugggguggagagu

SEQ ID NO: 6640 - RNA, 20 nt, Artificial Sequence
  targeting sequence with TTCN PAM
guagaugucuauuaggucug

SEQ ID NO: 6641 - RNA, 20 nt, Artificial Sequence
  targeting sequence with TTCN PAM
aguccugaauauccuuauua

SEQ ID NO: 6642 - RNA, 20 nt, Artificial Sequence
  targeting sequence with TTCN PAM
ugguuuagucuugggagggu

SEQ ID NO: 6643 - RNA, 20 nt, Artificial Sequence
  targeting sequence with TTCN PAM
ucuugguuuagucuugggag

SEQ ID NO: 6644 - RNA, 20 nt, Artificial Sequence
  targeting sequence with TTCN PAM
acuucuucuugguuuagucu

SEQ ID NO: 6645 - RNA, 20 nt, Artificial Sequence
  targeting sequence with TTCN PAM
gggauucgacuucuucuugg

SEQ ID NO: 6646 - RNA, 20 nt, Artificial Sequence
  targeting sequence with TTCN PAM
gaaauggaggcaguaauuaa

SEQ ID NO: 6647 - RNA, 20 nt, Artificial Sequence
  targeting sequence with TTCN PAM
gaacuuguuauuggucuauu

SEQ ID NO: 6648 - RNA, 20 nt, Artificial Sequence
  targeting sequence with TTCN PAM
cagcugaauucuaccagagg

SEQ ID NO: 6649 - RNA, 20 nt, Artificial Sequence
  targeting sequence with TTCN PAM
gcugugaauccaucuggucc

SEQ ID NO: 6650 - RNA, 20 nt, Artificial Sequence
  targeting sequence with TTCN PAM
accagagguacaaagaggag

SEQ ID NO: 6651 - RNA, 20 nt, Artificial Sequence
  targeting sequence with TTCN PAM
uucugaaacuauuccaagca

SEQ ID NO: 6652 - RNA, 20 nt, Artificial Sequence
  targeting sequence with TTCN PAM
gaaacuauuccaagcaacag

SEQ ID NO: 6653 - RNA, 20 nt, Artificial Sequence
  targeting sequence with TTCN PAM
gaaggaaugguaccagcucc

SEQ ID NO: 6654 - RNA, 20 nt, Artificial Sequence
  targeting sequence with TTCN PAM
aagcaacagaaaaagaggga

SEQ ID NO: 6655 - RNA, 20 nt, Artificial Sequence
  targeting sequence with TTCN PAM
guugcuuggaauaguuucag

SEQ ID NO: 6656 - RNA, 20 nt, Artificial Sequence
  targeting sequence with TTCN PAM
aauacuauguuaaauaagag

SEQ ID NO: 6657 - RNA, 20 nt, Artificial Sequence
  targeting sequence with TTCN PAM
ggccagggcaaucaggcaag

SEQ ID NO: 6658 - RNA, 20 nt, Artificial Sequence
  targeting sequence with TTCN PAM
cuugccugauugcccuggcc

SEQ ID NO: 6659 - RNA, 20 nt, Artificial Sequence
  targeting sequence with TTCN PAM
uucucuugccugauugcccu

SEQ ID NO: 6660 - RNA, 20 nt, Artificial Sequence
  targeting sequence with TTCN PAM
gauaggaagacaggaaguca

SEQ ID NO: 6661 - RNA, 20 nt, Artificial Sequence
  targeting sequence with TTCN PAM
uaucugaauacccuuuauuu

SEQ ID NO: 6662 - RNA, 20 nt, Artificial Sequence
  targeting sequence with TTCN PAM
ugucuuccuaucugaauacc

SEQ ID NO: 6663 - RNA, 20 nt, Artificial Sequence
  targeting sequence with TTCN PAM
aaauauacaaucaugucauc

SEQ ID NO: 6664 - RNA, 20 nt, Artificial Sequence
  targeting sequence with TTCN PAM
cucaggccaaaaucuccuua

SEQ ID NO: 6665 - RNA, 20 nt, Artificial Sequence
  targeting sequence with TTCN PAM
gcaaagucucaggauacaaa

SEQ ID NO: 6666 - RNA, 20 nt, Artificial Sequence
  targeting sequence with TTCN PAM
uauacacgaauaauagacaa

SEQ ID NO: 6667 - RNA, 20 nt, Artificial Sequence
  targeting sequence with TTCN PAM
uguauaggaauguuugugau

SEQ ID NO: 6668 - RNA, 20 nt, Artificial Sequence
  targeting sequence with TTCN PAM
cucaugauuugucuauuauu

SEQ ID NO: 6669 - RNA, 20 nt, Artificial Sequence
  targeting sequence with TTCN PAM
caauuacuacaaagagaaaa

SEQ ID NO: 6670 - RNA, 20 nt, Artificial Sequence
  targeting sequence with TTCN PAM
cuuuguaguaauugugaaug

SEQ ID NO: 6671 - RNA, 20 nt, Artificial Sequence
  targeting sequence with TTCN PAM
uagguauuuuuuucucuuug

SEQ ID NO: 6672 - RNA, 20 nt, Artificial Sequence
  targeting sequence with TTCN PAM
ucaaggagaacuacaaacca

SEQ ID NO: 6673 - RNA, 20 nt, Artificial Sequence
  targeting sequence with TTCN PAM
aggagaacuacaaaccacug

SEQ ID NO: 6674 - RNA, 20 nt, Artificial Sequence
  targeting sequence with TTCN PAM
ccuugaagaaguccuccaca

SEQ ID NO: 6675 - RNA, 20 nt, Artificial Sequence
  targeting sequence with TTCN PAM
uugagcagugguuuguaguu

SEQ ID NO: 6676 - RNA, 20 nt, Artificial Sequence
  targeting sequence with TTCN PAM
auuuguuuguguccucucuu

SEQ ID NO: 6677 - RNA, 20 nt, Artificial Sequence
  targeting sequence with TTCN PAM
augcucgugcccaggaagaa

SEQ ID NO: 6678 - RNA, 20 nt, Artificial Sequence
  targeting sequence with TTCN PAM
ugggcacgagcauggaaugu

SEQ ID NO: 6679 - RNA, 20 nt, Artificial Sequence
  targeting sequence with TTCN PAM
uccugggcacgagcauggaa

SEQ ID NO: 6680 - RNA, 20 nt, Artificial Sequence
  targeting sequence with TTCN PAM
caacauugauucuuccuggg

SEQ ID NO: 6681 - RNA, 20 nt, Artificial Sequence
  targeting sequence with TTCN PAM
acgcuauccccaucaagcua

SEQ ID NO: 6682 - RNA, 20 nt, Artificial Sequence
  targeting sequence with TTCN PAM
ucacagaauuagagaaaacu

SEQ ID NO: 6683 - RNA, 20 nt, Artificial Sequence
  targeting sequence with TTCN PAM
cagaauuagagaaaacuacu

SEQ ID NO: 6684 - RNA, 20 nt, Artificial Sequence
  targeting sequence with TTCN PAM
gugaagaaagucagugguag

SEQ ID NO: 6685 - RNA, 20 nt, Artificial Sequence
  targeting sequence with TTCN PAM
cuaauucugugaagaaaguc

SEQ ID NO: 6686 - RNA, 20 nt, Artificial Sequence
  targeting sequence with TTCN PAM
uauggaaccaaaacagaacc

SEQ ID NO: 6687 - RNA, 20 nt, Artificial Sequence
  targeting sequence with TTCN PAM
auaugaaauuuaaaguaguu

SEQ ID NO: 6688 - RNA, 20 nt, Artificial Sequence
  targeting sequence with TTCN PAM
guuuugguuccauaugaaau

SEQ ID NO: 6689 - RNA, 20 nt, Artificial Sequence
  targeting sequence with TTCN PAM
uuuugcuuaggauugucuug

SEQ ID NO: 6690 - RNA, 20 nt, Artificial Sequence
  targeting sequence with TTCN PAM
aacuauacuacaaggcuaca

SEQ ID NO: 6691 - RNA, 20 nt, Artificial Sequence
  targeting sequence with TTCN PAM
uguuuuuaauguaagcauuu

SEQ ID NO: 6692 - RNA, 20 nt, Artificial Sequence
  targeting sequence with TTCN PAM
auugacaaccuaacuuuaca

SEQ ID NO: 6693 - RNA, 20 nt, Artificial Sequence
  targeting sequence with TTCN PAM
uuagguguaaaguuagguug

SEQ ID NO: 6694 - RNA, 20 nt, Artificial Sequence
  targeting sequence with TTCN PAM
aguuccuuagguguaaaguu

SEQ ID NO: 6695 - RNA, 20 nt, Artificial Sequence
  targeting sequence with TTCN PAM
uuuucuaguuccuuaggugu

SEQ ID NO: 6696 - RNA, 20 nt, Artificial Sequence
  targeting sequence with TTCN PAM
ucuuuuucuaguuccuuagg

SEQ ID NO: 6697 - RNA, 20 nt, Artificial Sequence
  targeting sequence with TTCN PAM
uuuuacuaccuuuaaguuug

SEQ ID NO: 6698 - RNA, 20 nt, Artificial Sequence
  targeting sequence with TTCN PAM
uuccuuuuacuaccuuuaag

SEQ ID NO: 6699 - RNA, 20 nt, Artificial Sequence
  targeting sequence with TTCN PAM
acucuaaucuuuguuauuuc

SEQ ID NO: 6700 - RNA, 20 nt, Artificial Sequence
  targeting sequence with TTCN PAM
uuauuuuauuuauuuccacu

SEQ ID NO: 6701 - RNA, 20 nt, Artificial Sequence
  targeting sequence with TTCN PAM
uuuugguauuguuuugccau

SEQ ID NO: 6702 - RNA, 20 nt, Artificial Sequence
  targeting sequence with TTCN PAM
uugauuuuuuuuuuucuuuu

SEQ ID NO: 6703 - RNA, 20 nt, Artificial Sequence
  targeting sequence with TTCN PAM
aagaggcaacuuuugguuuc

SEQ ID NO: 6704 - RNA, 20 nt, Artificial Sequence
  targeting sequence with TTCN PAM
uucaaagaggcaacuuuugg

SEQ ID NO: 6705 - RNA, 20 nt, Artificial Sequence
  targeting sequence with TTCN PAM
cccuuuuuuguguuagucua

SEQ ID NO: 6706 - RNA, 20 nt, Artificial Sequence
  targeting sequence with TTCN PAM
gaguuuaguaauuugauccu

SEQ ID NO: 6707 - RNA, 20 nt, Artificial Sequence
  targeting sequence with TTCN PAM
uuucugaguuuaguaauuug

SEQ ID NO: 6708 - RNA, 20 nt, Artificial Sequence
  targeting sequence with TTCN PAM
guaaaauugguaguuaugua

SEQ ID NO: 6709 - RNA, 20 nt, Artificial Sequence
  targeting sequence with TTCN PAM
auuucuguaaaauugguagu

SEQ ID NO: 6710 - RNA, 20 nt, Artificial Sequence
  targeting sequence with TTCN PAM
uuuuuuuuuuuuggauuacc

SEQ ID NO: 6711 - RNA, 20 nt, Artificial Sequence
  targeting sequence with TTCN PAM
uuucuuuuuuuuuuuuugga

SEQ ID NO: 6712 - RNA, 20 nt, Artificial Sequence
  targeting sequence with TTCN PAM
uuucuuuucuuuuuuuuuuu

SEQ ID NO: 6713 - RNA, 20 nt, Artificial Sequence
  targeting sequence with TTCN PAM
uuguugggaguuuguuuuuc

SEQ ID NO: 6714 - RNA, 20 nt, Artificial Sequence
  targeting sequence with TTCN PAM
cuggugaauucuaccaauau

SEQ ID NO: 6715 - RNA, 20 nt, Artificial Sequence
  targeting sequence with TTCN PAM
ccagugaagccaucuggucc

SEQ ID NO: 6716 - RNA, 20 nt, Artificial Sequence
  targeting sequence with TTCN PAM
accaauauuuaaagaauuac

SEQ ID NO: 6717 - RNA, 20 nt, Artificial Sequence
  targeting sequence with TTCN PAM
uuaaauauugguagaauuca

SEQ ID NO: 6718 - RNA, 20 nt, Artificial Sequence
  targeting sequence with TTCN PAM
gccagagcaauuaggcaaga

SEQ ID NO: 6719 - RNA, 20 nt, Artificial Sequence
  targeting sequence with TTCN PAM
ugccuaauugcucuggcuga

SEQ ID NO: 6720 - RNA, 20 nt, Artificial Sequence
  targeting sequence with TTCN PAM
uuuucuugccuaauugcucu

SEQ ID NO: 6721 - RNA, 20 nt, Artificial Sequence
  targeting sequence with TTCN PAM
auuuggaugucuuuuaguuc

SEQ ID NO: 6722 - RNA, 20 nt, Artificial Sequence
  targeting sequence with TTCN PAM
ccugccucagccucccgagu

SEQ ID NO: 6723 - RNA, 20 nt, Artificial Sequence
  targeting sequence with TTCN PAM
cgccauucuccugccucagc

SEQ ID NO: 6724 - RNA, 20 nt, Artificial Sequence
  targeting sequence with TTCN PAM
cggguucacgccauucuccu

SEQ ID NO: 6725 - RNA, 20 nt, Artificial Sequence
  targeting sequence with TTCN PAM
cggcuucccggguucacgcc

SEQ ID NO: 6726 - RNA, 20 nt, Artificial Sequence
  targeting sequence with TTCN PAM
uuuuuuuuuuuuuuuuuuuu

SEQ ID NO: 6727 - RNA, 20 nt, Artificial Sequence
  targeting sequence with TTCN PAM
guuugaucauuguuagugua

SEQ ID NO: 6728 - RNA, 20 nt, Artificial Sequence
  targeting sequence with TTCN PAM
uuuucaguuugaucauuguu

SEQ ID NO: 6729 - RNA, 20 nt, Artificial Sequence
  targeting sequence with TTCN PAM
acuuacaauagcaucaaaaa

SEQ ID NO: 6730 - RNA, 20 nt, Artificial Sequence
  targeting sequence with TTCN PAM
uaaguauuuuauuauuuuug

SEQ ID NO: 6731 - RNA, 20 nt, Artificial Sequence
  targeting sequence with TTCN PAM
uuaaguugguuccuaaguau

SEQ ID NO: 6732 - RNA, 20 nt, Artificial Sequence
  targeting sequence with TTCN PAM
cuguacaagucuuuuguuuc

SEQ ID NO: 6733 - RNA, 20 nt, Artificial Sequence
  targeting sequence with TTCN PAM
gcaauguuuguagauuucac

SEQ ID NO: 6734 - RNA, 20 nt, Artificial Sequence
  targeting sequence with TTCN PAM
uucagcaauguuuguagauu

SEQ ID NO: 6735 - RNA, 20 nt, Artificial Sequence
  targeting sequence with TTCN PAM
aggauugaaagacaaaaucu

SEQ ID NO: 6736 - RNA, 20 nt, Artificial Sequence
  targeting sequence with TTCN PAM
auccuugaacacaagauguc

SEQ ID NO: 6737 - RNA, 20 nt, Artificial Sequence
  targeting sequence with TTCN PAM
uggcuaugacagcaaaaaac

SEQ ID NO: 6738 - RNA, 20 nt, Artificial Sequence
  targeting sequence with TTCN PAM
cuuuaguuaccuguguuuuu

SEQ ID NO: 6739 - RNA, 20 nt, Artificial Sequence
  targeting sequence with TTCN PAM
caguuuggugauugacuuuu

SEQ ID NO: 6740 - RNA, 20 nt, Artificial Sequence
  targeting sequence with TTCN PAM
uauauagaaaauuuuaauuu

SEQ ID NO: 6741 - RNA, 20 nt, Artificial Sequence
  targeting sequence with TTCN PAM
auauaggaaaaaaugccuca

SEQ ID NO: 6742 - RNA, 20 nt, Artificial Sequence
  targeting sequence with TTCN PAM
auuuuuauuaccuaccucug

SEQ ID NO: 6743 - RNA, 20 nt, Artificial Sequence
  targeting sequence with TTCN PAM
aggcguaauccucacggcuc

SEQ ID NO: 6744 - RNA, 20 nt, Artificial Sequence
  targeting sequence with TTCN PAM
ucuaggcguaauccucacgg

SEQ ID NO: 6745 - RNA, 20 nt, Artificial Sequence
  targeting sequence with TTCN PAM
gcacaucuggaugcgcugau

SEQ ID NO: 6746 - RNA, 20 nt, Artificial Sequence
  targeting sequence with TTCN PAM
ccggguugccugugaucagc

SEQ ID NO: 6747 - RNA, 20 nt, Artificial Sequence
  targeting sequence with TTCN PAM
gauucgccggguugccugug

SEQ ID NO: 6748 - RNA, 20 nt, Artificial Sequence
  targeting sequence with TTCN PAM
ugucuguccuuugcugcuga

SEQ ID NO: 6749 - RNA, 20 nt, Artificial Sequence
  targeting sequence with TTCN PAM
cauuacuuacaaaacuccuu

SEQ ID NO: 6750 - RNA, 20 nt, Artificial Sequence
  targeting sequence with TTCN PAM
gcucggaucaccaagugcug

SEQ ID NO: 6751 - RNA, 20 nt, Artificial Sequence
  targeting sequence with TTCN PAM
ucauugauauucugcucgga

SEQ ID NO: 6752 - RNA, 20 nt, Artificial Sequence
  targeting sequence with TTCN PAM
auaacuugcccuguguugcu

SEQ ID NO: 6753 - RNA, 20 nt, Artificial Sequence
  targeting sequence with TTCN PAM
uauuagcaucuuucuauaac

SEQ ID NO: 6754 - RNA, 20 nt, Artificial Sequence
  targeting sequence with TTCN PAM
ucuuauuagcaucuuucuau

SEQ ID NO: 6755 - RNA, 20 nt, Artificial Sequence
  targeting sequence with TTCN PAM
cacacccacaucccccauuu

SEQ ID NO: 6756 - RNA, 20 nt, Artificial Sequence
  targeting sequence with TTCN PAM
aauuuugauuaauuucuuaa

SEQ ID NO: 6757 - RNA, 20 nt, Artificial Sequence
  targeting sequence with TTCN PAM
uaagcucaacuuaagcauaa

SEQ ID NO: 6758 - RNA, 20 nt, Artificial Sequence
  targeting sequence with TTCN PAM
ccaagcaaaagccaaaucuu

SEQ ID NO: 6759 - RNA, 20 nt, Artificial Sequence
  targeting sequence with TTCN PAM
caguucaccaagcaaaagcc

SEQ ID NO: 6760 - RNA, 20 nt, Artificial Sequence
  targeting sequence with TTCN PAM
gguggcuucucaguucacca

SEQ ID NO: 6761 - RNA, 20 nt, Artificial Sequence
  targeting sequence with TTCN PAM
cuacucagcaaccagggugg

SEQ ID NO: 6762 - RNA, 20 nt, Artificial Sequence
  targeting sequence with TTCN PAM
gccuugcaguuuauucucua

SEQ ID NO: 6763 - RNA, 20 nt, Artificial Sequence
  targeting sequence with TTCN PAM
ugcuucugccuugcaguuua

SEQ ID NO: 6764 - RNA, 20 nt, Artificial Sequence
  targeting sequence with TTCN PAM
uagauaaggucccauugguc

SEQ ID NO: 6765 - RNA, 20 nt, Artificial Sequence
  targeting sequence with TTCN PAM
uccuagauaaggucccauug

SEQ ID NO: 6766 - RNA, 20 nt, Artificial Sequence
  targeting sequence with TTCN PAM
uuacauuucuuccuagauaa

SEQ ID NO: 6767 - RNA, 20 nt, Artificial Sequence
  targeting sequence with TTCN PAM
caacagaaacuuggccuuuc

SEQ ID NO: 6768 - RNA, 20 nt, Artificial Sequence
  targeting sequence with TTCN PAM
guugggaauucuuuacauuu

SEQ ID NO: 6769 - RNA, 20 nt, Artificial Sequence
  targeting sequence with TTCN PAM
cugaaagagauuaaucacaa

SEQ ID NO: 6770 - RNA, 20 nt, Artificial Sequence
  targeting sequence with TTCN PAM
gggaaaggccaaguuucugu

SEQ ID NO: 6771 - RNA, 20 nt, Artificial Sequence
  targeting sequence with TTCN PAM
gagccagcaacuggguaugc

SEQ ID NO: 6772 - RNA, 20 nt, Artificial Sequence
  targeting sequence with TTCN PAM
uguuacgugccuacagcuuc

SEQ ID NO: 6773 - RNA, 20 nt, Artificial Sequence
  targeting sequence with TTCN PAM
acaacagucuguauccacca

SEQ ID NO: 6774 - RNA, 20 nt, Artificial Sequence
  targeting sequence with TTCN PAM
cgcaugcagggcuacugguu

SEQ ID NO: 6775 - RNA, 20 nt, Artificial Sequence
  targeting sequence with TTCN PAM
ccuucacuuccagagcugca

SEQ ID NO: 6776 - RNA, 20 nt, Artificial Sequence
  targeting sequence with TTCN PAM
cuuccagagcugcaauugcu

SEQ ID NO: 6777 - RNA, 20 nt, Artificial Sequence
  targeting sequence with TTCN PAM
agagcugcaauugcuuccug

SEQ ID NO: 6778 - RNA, 20 nt, Artificial Sequence
  targeting sequence with TTCN PAM
ugaaaacagguaagcagaaa

SEQ ID NO: 6779 - RNA, 20 nt, Artificial Sequence
  targeting sequence with TTCN PAM
ggaagcaauugcagcucugg

SEQ ID NO: 6780 - RNA, 20 nt, Artificial Sequence
  targeting sequence with TTCN PAM
gcuuaccuguuuucaggaag

SEQ ID NO: 6781 - RNA, 20 nt, Artificial Sequence
  targeting sequence with TTCN PAM
uguaggauccacaguaaauu

SEQ ID NO: 6782 - RNA, 20 nt, Artificial Sequence
  targeting sequence with TTCN PAM
uuaaaacacauuugcaggca

SEQ ID NO: 6783 - RNA, 20 nt, Artificial Sequence
  targeting sequence with TTCN PAM
caaggcaaaacuaauuucag

SEQ ID NO: 6784 - RNA, 20 nt, Artificial Sequence
  targeting sequence with TTCN PAM
ggcgauagaagugaaaauag

SEQ ID NO: 6785 - RNA, 20 nt, Artificial Sequence
  targeting sequence with TTCN PAM
aaaauagagauugagcagga

SEQ ID NO: 6786 - RNA, 20 nt, Artificial Sequence
  targeting sequence with TTCN PAM
ugcucaaucucuauuuuaga

SEQ ID NO: 6787 - RNA, 20 nt, Artificial Sequence
  targeting sequence with TTCN PAM
cagcuuuauuuggucuuccu

SEQ ID NO: 6788 - RNA, 20 nt, Artificial Sequence
  targeting sequence with TTCN PAM
uuaggccucuuuaaaauaua

SEQ ID NO: 6789 - RNA, 20 nt, Artificial Sequence
  targeting sequence with TTCN PAM
ugacacuuuuauacucagcu

SEQ ID NO: 6790 - RNA, 20 nt, Artificial Sequence
  targeting sequence with TTCN PAM
ucaagcucuguauacacuua

SEQ ID NO: 6791 - RNA, 20 nt, Artificial Sequence
  targeting sequence with TTCN PAM
cuugcuugugagcaugagua

SEQ ID NO: 6792 - RNA, 20 nt, Artificial Sequence
  targeting sequence with TTCN PAM
guguguagguuugccagagu

SEQ ID NO: 6793 - RNA, 20 nt, Artificial Sequence
  targeting sequence with TTCN PAM
uaugguuauuucuuacccag

SEQ ID NO: 6794 - RNA, 20 nt, Artificial Sequence
  targeting sequence with TTCN PAM
uacccaguguucucauuacu

SEQ ID NO: 6795 - RNA, 20 nt, Artificial Sequence
  targeting sequence with TTCN PAM
cauuacugucucuuuuuaau

SEQ ID NO: 6796 - RNA, 20 nt, Artificial Sequence
  targeting sequence with TTCN PAM
gguacugauuaaaaagagac

SEQ ID NO: 6797 - RNA, 20 nt, Artificial Sequence
  targeting sequence with TTCN PAM
aauuccagcaggacacaggg

SEQ ID NO: 6798 - RNA, 20 nt, Artificial Sequence
  targeting sequence with TTCN PAM
aaacagacucagcaguucag

SEQ ID NO: 6799 - RNA, 20 nt, Artificial Sequence
  targeting sequence with TTCN PAM
agcaggacacagggaauuac

SEQ ID NO: 6800 - RNA, 20 nt, Artificial Sequence
  targeting sequence with TTCN PAM
cuguguccugcuggaauucg

SEQ ID NO: 6801 - RNA, 20 nt, Artificial Sequence
  targeting sequence with TTCN PAM
uuaauuggcuggcuacuccc

SEQ ID NO: 6802 - RNA, 20 nt, Artificial Sequence
  targeting sequence with TTCN PAM
ugagauugucaugggcugcg

SEQ ID NO: 6803 - RNA, 20 nt, Artificial Sequence
  targeting sequence with TTCN PAM
acuguggcuugcuucaugag

SEQ ID NO: 6804 - RNA, 20 nt, Artificial Sequence
  targeting sequence with TTCN PAM
cuucuacuguggcuugcuuc

SEQ ID NO: 6805 - RNA, 20 nt, Artificial Sequence
  targeting sequence with TTCN PAM
auugucuaaagaauggaaca

SEQ ID NO: 6806 - RNA, 20 nt, Artificial Sequence
  targeting sequence with TTCN PAM
uuagacaauggaaguaagug

SEQ ID NO: 6807 - RNA, 20 nt, Artificial Sequence
  targeting sequence with TTCN PAM
auucuuuagacaauggaagu

SEQ ID NO: 6808 - RNA, 20 nt, Artificial Sequence
  targeting sequence with TTCN PAM
cauaauacuuguuccauucu

SEQ ID NO: 6809 - RNA, 20 nt, Artificial Sequence
  targeting sequence with TTCN PAM
agacauuuuagucccucuua

SEQ ID NO: 6810 - RNA, 20 nt, Artificial Sequence
  targeting sequence with TTCN PAM
ucaacccuaauagaagaccu

SEQ ID NO: 6811 - RNA, 20 nt, Artificial Sequence
  targeting sequence with TTCN PAM
auuaggguugaggaaaucau

SEQ ID NO: 6812 - RNA, 20 nt, Artificial Sequence
  targeting sequence with TTCN PAM
gggguaccacauaaggacau

SEQ ID NO: 6813 - RNA, 20 nt, Artificial Sequence
  targeting sequence with TTCN PAM
gaaugggcgggaagaaagug

SEQ ID NO: 6814 - RNA, 20 nt, Artificial Sequence
  targeting sequence with TTCN PAM
gaaaugucagccggcagaca

SEQ ID NO: 6815 - RNA, 20 nt, Artificial Sequence
  targeting sequence with TTCN PAM
cgcccauuccgaaaugucag

SEQ ID NO: 6816 - RNA, 20 nt, Artificial Sequence
  targeting sequence with TTCN PAM
ucccgcccauuccgaaaugu

SEQ ID NO: 6817 - RNA, 20 nt, Artificial Sequence
  targeting sequence with TTCN PAM
auaccaucuuuggugagguc

SEQ ID NO: 6818 - RNA, 20 nt, Artificial Sequence
  targeting sequence with TTCN PAM
ucuaauaacgugggcauugu

SEQ ID NO: 6819 - RNA, 20 nt, Artificial Sequence
  targeting sequence with TTCN PAM
uuuuaagauuuuuacuuguc

SEQ ID NO: 6820 - RNA, 20 nt, Artificial Sequence
  targeting sequence with TTCN PAM
gaguccauucauacuauuua

SEQ ID NO: 6821 - RNA, 20 nt, Artificial Sequence
  targeting sequence with TTCN PAM
uacuauuuaaaaacaugauu

SEQ ID NO: 6822 - RNA, 20 nt, Artificial Sequence
  targeting sequence with TTCN PAM
aucugucuacagcuugcaag

SEQ ID NO: 6823 - RNA, 20 nt, Artificial Sequence
  targeting sequence with TTCN PAM
uagucuacuucugaugggau

SEQ ID NO: 6824 - RNA, 20 nt, Artificial Sequence
  targeting sequence with TTCN PAM
gaugggauggagucucucug

SEQ ID NO: 6825 - RNA, 20 nt, Artificial Sequence
  targeting sequence with TTCN PAM
aaaagaagaaaaaaaggcag

SEQ ID NO: 6826 - RNA, 20 nt, Artificial Sequence
  targeting sequence with TTCN PAM
uuuugaaguuugguuguaaa

SEQ ID NO: 6827 - RNA, 20 nt, Artificial Sequence
  targeting sequence with TTCN PAM
ucuuuuugaaguuugguugu

SEQ ID NO: 6828 - RNA, 20 nt, Artificial Sequence
  targeting sequence with TTCN PAM
auuuuuuuucauuuuaaauu

SEQ ID NO: 6829 - RNA, 20 nt, Artificial Sequence
  targeting sequence with TTCN PAM
uuuuaaauuuuccauaagua

SEQ ID NO: 6830 - RNA, 20 nt, Artificial Sequence
  targeting sequence with TTCN PAM
auaaguaauguaaucaguca

SEQ ID NO: 6831 - RNA, 20 nt, Artificial Sequence
  targeting sequence with TTCN PAM
augguuuccuauuuccuaug

SEQ ID NO: 6832 - RNA, 20 nt, Artificial Sequence
  targeting sequence with TTCN PAM
uauuuccuaugcugaaaaac

SEQ ID NO: 6833 - RNA, 20 nt, Artificial Sequence
  targeting sequence with TTCN PAM
uaugcugaaaaacagcagag

SEQ ID NO: 6834 - RNA, 20 nt, Artificial Sequence
  targeting sequence with TTCN PAM
gcauaggaaauaggaaacca

SEQ ID NO: 6835 - RNA, 20 nt, Artificial Sequence
  targeting sequence with TTCN PAM
caguagccuguaagacccuu

SEQ ID NO: 6836 - RNA, 20 nt, Artificial Sequence
  targeting sequence with TTCN PAM
uaacuugaccucugguaucu

SEQ ID NO: 6837 - RNA, 20 nt, Artificial Sequence
  targeting sequence with TTCN PAM
ggucuuugcuagaugucacc

SEQ ID NO: 6838 - RNA, 20 nt, Artificial Sequence
  targeting sequence with TTCN PAM
cuggggugacaucuagcaaa

SEQ ID NO: 6839 - RNA, 20 nt, Artificial Sequence
  targeting sequence with TTCN PAM
ugaucacccuacugaaaauc

SEQ ID NO: 6840 - RNA, 20 nt, Artificial Sequence
  targeting sequence with TTCN PAM
caucacucagccauuuacag

SEQ ID NO: 6841 - RNA, 20 nt, Artificial Sequence
  targeting sequence with TTCN PAM
acacuguagagguguuuuua

SEQ ID NO: 6842 - RNA, 20 nt, Artificial Sequence
  targeting sequence with TTCN PAM
cugugccagaccuccccuca

SEQ ID NO: 6843 - RNA, 20 nt, Artificial Sequence
  targeting sequence with TTCN PAM
ugaggggaggucuggcacag

SEQ ID NO: 6844 - RNA, 20 nt, Artificial Sequence
  targeting sequence with TTCN PAM
uucaaccauccucugcucau

SEQ ID NO: 6845 - RNA, 20 nt, Artificial Sequence
  targeting sequence with TTCN PAM
accauccucugcucaugcuu

SEQ ID NO: 6846 - RNA, 20 nt, Artificial Sequence
  targeting sequence with TTCN PAM
uccuuugcuugaacaccagg

SEQ ID NO: 6847 - RNA, 20 nt, Artificial Sequence
  targeting sequence with TTCN PAM
agcaaaggaugaaggagaga

SEQ ID NO: 6848 - RNA, 20 nt, Artificial Sequence
  targeting sequence with TTCN PAM
caagacaggcgaugcgucuu

SEQ ID NO: 6849 - RNA, 20 nt, Artificial Sequence
  targeting sequence with TTCN PAM
ugcucucacucacccuuccu

SEQ ID NO: 6850 - RNA, 20 nt, Artificial Sequence
  targeting sequence with TTCN PAM
uuccauuccagcuuggagug

SEQ ID NO: 6851 - RNA, 20 nt, Artificial Sequence
  targeting sequence with TTCN PAM
uuguuaaaccaucagcugcc

SEQ ID NO: 6852 - RNA, 20 nt, Artificial Sequence
  targeting sequence with TTCN PAM
ccuuauuucaaacugacaug

SEQ ID NO: 6853 - RNA, 20 nt, Artificial Sequence
  targeting sequence with TTCN PAM
aacugacaugagacacaaaa

SEQ ID NO: 6854 - RNA, 20 nt, Artificial Sequence
  targeting sequence with TTCN PAM
uuugugucucaugucaguuu

SEQ ID NO: 6855 - RNA, 20 nt, Artificial Sequence
  targeting sequence with TTCN PAM
acucuucuugaaaauuuccc

SEQ ID NO: 6856 - RNA, 20 nt, Artificial Sequence
  targeting sequence with TTCN PAM
ugaaaauuucccccacuacc

SEQ ID NO: 6857 - RNA, 20 nt, Artificial Sequence
  targeting sequence with TTCN PAM
gcaacucauguaacauuaca

SEQ ID NO: 6858 - RNA, 20 nt, Artificial Sequence
  targeting sequence with TTCN PAM
auguaauguuacaugaguug

SEQ ID NO: 6859 - RNA, 20 nt, Artificial Sequence
  targeting sequence with TTCN PAM
ucaaagcuggcgguuugagg

SEQ ID NO: 6860 - RNA, 20 nt, Artificial Sequence
  targeting sequence with TTCN PAM
cagaaggauuuggcacagcu

SEQ ID NO: 6861 - RNA, 20 nt, Artificial Sequence
  targeting sequence with TTCN PAM
gugaaaacuuccucaaagcu

SEQ ID NO: 6862 - RNA, 20 nt, Artificial Sequence
  targeting sequence with TTCN PAM
ggccaugucaucaucagcug

SEQ ID NO: 6863 - RNA, 20 nt, Artificial Sequence
  targeting sequence with TTCN PAM
aagcuccaaacucaugccaa

SEQ ID NO: 6864 - RNA, 20 nt, Artificial Sequence
  targeting sequence with TTCN PAM
cuagguucuaagcuccaaac

SEQ ID NO: 6865 - RNA, 20 nt, Artificial Sequence
  targeting sequence with TTCN PAM
uccacacauuuucagcagaa

SEQ ID NO: 6866 - RNA, 20 nt, Artificial Sequence
  targeting sequence with TTCN PAM
cgauaaaauaaucacauuuu

SEQ ID NO: 6867 - RNA, 20 nt, Artificial Sequence
  targeting sequence with TTCN PAM
cuauucuauuuacuuuggaa

SEQ ID NO: 6868 - RNA, 20 nt, Artificial Sequence
  targeting sequence with TTCN PAM
auuuacuuuggaagaaaaau

SEQ ID NO: 6869 - RNA, 20 nt, Artificial Sequence
  targeting sequence with TTCN PAM
aaaguaaauagaauagggaa

SEQ ID NO: 6870 - RNA, 20 nt, Artificial Sequence
  targeting sequence with TTCN PAM
uccaaaguaaauagaauagg

SEQ ID NO: 6871 - RNA, 20 nt, Artificial Sequence
  targeting sequence with TTCN PAM
guucuagagaaagcuggugu

SEQ ID NO: 6872 - RNA, 20 nt, Artificial Sequence
  targeting sequence with TTCN PAM
agagaaagcugguguguucu

SEQ ID NO: 6873 - RNA, 20 nt, Artificial Sequence
  targeting sequence with TTCN PAM
cuagaacggaaagauuuuuc

SEQ ID NO: 6874 - RNA, 20 nt, Artificial Sequence
  targeting sequence with TTCN PAM
uuucaugaaacuggcaaaca

SEQ ID NO: 6875 - RNA, 20 nt, Artificial Sequence
  targeting sequence with TTCN PAM
uuagaaagauauacaccaaa

SEQ ID NO: 6876 - RNA, 20 nt, Artificial Sequence
  targeting sequence with TTCN PAM
aaagaauauaucuagcauau

SEQ ID NO: 6877 - RNA, 20 nt, Artificial Sequence
  targeting sequence with TTCN PAM
caacaauaacucuaacuccu

SEQ ID NO: 6878 - RNA, 20 nt, Artificial Sequence
  targeting sequence with TTCN PAM
aacuauuuuguguaccuaaa

SEQ ID NO: 6879 - RNA, 20 nt, Artificial Sequence
  targeting sequence with TTCN PAM
uuugauauuuuuuguuuugc

SEQ ID NO: 6880 - RNA, 20 nt, Artificial Sequence
  targeting sequence with TTCN PAM
caccuacucagaagucuuaa

SEQ ID NO: 6881 - RNA, 20 nt, Artificial Sequence
  targeting sequence with TTCN PAM
gaguaggugugaauuccuuu

SEQ ID NO: 6882 - RNA, 20 nt, Artificial Sequence
  targeting sequence with TTCN PAM
guuuuucuauuaaauauagg

SEQ ID NO: 6883 - RNA, 20 nt, Artificial Sequence
  targeting sequence with TTCN PAM
auuaaauauagguguuuaaa

SEQ ID NO: 6884 - RNA, 20 nt, Artificial Sequence
  targeting sequence with TTCN PAM
aguguaauuuuaaacaccua

SEQ ID NO: 6885 - RNA, 20 nt, Artificial Sequence
  targeting sequence with TTCN PAM
ugccagaucugucauuuguu

SEQ ID NO: 6886 - RNA, 20 nt, Artificial Sequence
  targeting sequence with TTCN PAM
uuaggcuuaaaugggcuaaa

SEQ ID NO: 6887 - RNA, 20 nt, Artificial Sequence
  targeting sequence with TTCN PAM
uaggcaauuuucuguuuugg

SEQ ID NO: 6888 - RNA, 20 nt, Artificial Sequence
  targeting sequence with TTCN PAM
guuuuggaaauacugcauau

SEQ ID NO: 6889 - RNA, 20 nt, Artificial Sequence
  targeting sequence with TTCN PAM
aaaacagaaaauugccuagg

SEQ ID NO: 6890 - RNA, 20 nt, Artificial Sequence
  targeting sequence with TTCN PAM
uuuuagaccaacaugucuuu

SEQ ID NO: 6891 - RNA, 20 nt, Artificial Sequence
  targeting sequence with TTCN PAM
caggaaugauuaaggcaaau

SEQ ID NO: 6892 - RNA, 20 nt, Artificial Sequence
  targeting sequence with TTCN PAM
ugugaaaagacauguugguc

SEQ ID NO: 6893 - RNA, 20 nt, Artificial Sequence
  targeting sequence with TTCN PAM
uauuugccuuaaucauuccu

SEQ ID NO: 6894 - RNA, 20 nt, Artificial Sequence
  targeting sequence with TTCN PAM
aggugugaugacauuucaua

SEQ ID NO: 6895 - RNA, 20 nt, Artificial Sequence
  targeting sequence with TTCN PAM
uuagugccuggauauaacuu

SEQ ID NO: 6896 - RNA, 20 nt, Artificial Sequence
  targeting sequence with TTCN PAM
uaagacaaagcaaaaucauu

SEQ ID NO: 6897 - RNA, 20 nt, Artificial Sequence
  targeting sequence with TTCN PAM
gggcuuuauuuucuucagac

SEQ ID NO: 6898 - RNA, 20 nt, Artificial Sequence
  targeting sequence with TTCN PAM
ucagaccaagagugguauga

SEQ ID NO: 6899 - RNA, 20 nt, Artificial Sequence
  targeting sequence with TTCN PAM
gaccaagagugguaugaggg

SEQ ID NO: 6900 - RNA, 20 nt, Artificial Sequence
  targeting sequence with TTCN PAM
uuuugacaggucuauuugga

SEQ ID NO: 6901 - RNA, 20 nt, Artificial Sequence
  targeting sequence with TTCN PAM
auuucauuuugacaggucua

SEQ ID NO: 6902 - RNA, 20 nt, Artificial Sequence
  targeting sequence with TTCN PAM
uuccauuucauuuugacagg

SEQ ID NO: 6903 - RNA, 20 nt, Artificial Sequence
  targeting sequence with TTCN PAM
uacuucuaaguuguagagca

SEQ ID NO: 6904 - RNA, 20 nt, Artificial Sequence
  targeting sequence with TTCN PAM
aaguuguagagcacucugaa

SEQ ID NO: 6905 - RNA, 20 nt, Artificial Sequence
  targeting sequence with TTCN PAM
gagugcucuacaacuuagaa

SEQ ID NO: 6906 - RNA, 20 nt, Artificial Sequence
  targeting sequence with TTCN PAM
cggggcaaaagaucgaaaca

SEQ ID NO: 6907 - RNA, 20 nt, Artificial Sequence
  targeting sequence with TTCN PAM
aucuuuugccccgggaaugu

SEQ ID NO: 6908 - RNA, 20 nt, Artificial Sequence
  targeting sequence with TTCN PAM
aaaauugaacuggcacuugg

SEQ ID NO: 6909 - RNA, 20 nt, Artificial Sequence
  targeting sequence with TTCN PAM
auuuuagaaagucuguuucg

SEQ ID NO: 6910 - RNA, 20 nt, Artificial Sequence
  targeting sequence with TTCN PAM
caguccucaaaaucuccauc

SEQ ID NO: 6911 - RNA, 20 nt, Artificial Sequence
  targeting sequence with TTCN PAM
gacagcaauguuuucuaagu

SEQ ID NO: 6912 - RNA, 20 nt, Artificial Sequence
  targeting sequence with TTCN PAM
aaguuuaagagaaugagaaa

SEQ ID NO: 6913 - RNA, 20 nt, Artificial Sequence
  targeting sequence with TTCN PAM
cuuaaacuuagaaaacauug

SEQ ID NO: 6914 - RNA, 20 nt, Artificial Sequence
  targeting sequence with TTCN PAM
cauucucuuaaacuuagaaa

SEQ ID NO: 6915 - RNA, 20 nt, Artificial Sequence
  targeting sequence with TTCN PAM
uucccucuuuaauauaagcc

SEQ ID NO: 6916 - RNA, 20 nt, Artificial Sequence
  targeting sequence with TTCN PAM
cucuuuaauauaagccacac

SEQ ID NO: 6917 - RNA, 20 nt, Artificial Sequence
  targeting sequence with TTCN PAM
aaaaauuaacuucauaaaac

SEQ ID NO: 6918 - RNA, 20 nt, Artificial Sequence
  targeting sequence with TTCN PAM
uaaaaccacaucacuccgua

SEQ ID NO: 6919 - RNA, 20 nt, Artificial Sequence
  targeting sequence with TTCN PAM
agccuaccacuuuagcaauc

SEQ ID NO: 6920 - RNA, 20 nt, Artificial Sequence
  targeting sequence with TTCN PAM
auuuuauaauuuagugguag

SEQ ID NO: 6921 - RNA, 20 nt, Artificial Sequence
  targeting sequence with TTCN PAM
aacaacuuuuucuacaucaa

SEQ ID NO: 6922 - RNA, 20 nt, Artificial Sequence
  targeting sequence with TTCN PAM
acaucaauuuauucugagaa

SEQ ID NO: 6923 - RNA, 20 nt, Artificial Sequence
  targeting sequence with TTCN PAM
gagaacauaauuaaacaaua

SEQ ID NO: 6924 - RNA, 20 nt, Artificial Sequence
  targeting sequence with TTCN PAM
cagaauaaauugauguagaa

SEQ ID NO: 6925 - RNA, 20 nt, Artificial Sequence
  targeting sequence with TTCN PAM
uuaagggauuuauccauaua

SEQ ID NO: 6926 - RNA, 20 nt, Artificial Sequence
  targeting sequence with TTCN PAM
aacaauuaacaaaaaugaac

SEQ ID NO: 6927 - RNA, 20 nt, Artificial Sequence
  targeting sequence with TTCN PAM
uuuuuguuaauuguuagaau

SEQ ID NO: 6928 - RNA, 20 nt, Artificial Sequence
  targeting sequence with TTCN PAM
caguugauauuuaaaguuca

SEQ ID NO: 6929 - RNA, 20 nt, Artificial Sequence
  targeting sequence with TTCN PAM
aagaggcaucauggguaaug

SEQ ID NO: 6930 - RNA, 20 nt, Artificial Sequence
  targeting sequence with TTCN PAM
uuacccaugaugccucuuug

SEQ ID NO: 6931 - RNA, 20 nt, Artificial Sequence
  targeting sequence with TTCN PAM
guugagacguuuuucauuac

SEQ ID NO: 6932 - RNA, 20 nt, Artificial Sequence
  targeting sequence with TTCN PAM
agcuauccuccuaccucagc

SEQ ID NO: 6933 - RNA, 20 nt, Artificial Sequence
  targeting sequence with TTCN PAM
uccuaaagaaucaaguugau

SEQ ID NO: 6934 - RNA, 20 nt, Artificial Sequence
  targeting sequence with TTCN PAM
uaaagaaucaaguugaucaa

SEQ ID NO: 6935 - RNA, 20 nt, Artificial Sequence
  targeting sequence with TTCN PAM
uuaggaagaaagguaugagu

SEQ ID NO: 6936 - RNA, 20 nt, Artificial Sequence
  targeting sequence with TTCN PAM
ugaauggcuggaucaguggg

SEQ ID NO: 6937 - RNA, 20 nt, Artificial Sequence
  targeting sequence with TTCN PAM
ggaagcccuugaucaacuug

SEQ ID NO: 6938 - RNA, 20 nt, Artificial Sequence
  targeting sequence with TTCN PAM
gcucuugauacccacugauc

SEQ ID NO: 6939 - RNA, 20 nt, Artificial Sequence
  targeting sequence with TTCN PAM
guacucguagaguuauccug

SEQ ID NO: 6940 - RNA, 20 nt, Artificial Sequence
  targeting sequence with TTCN PAM
ggauaacucuacgaguacgg

SEQ ID NO: 6941 - RNA, 20 nt, Artificial Sequence
  targeting sequence with TTCN PAM
aauacaaauuuuuucauaua

SEQ ID NO: 6942 - RNA, 20 nt, Artificial Sequence
  targeting sequence with TTCN PAM
uauaagccauaguuuaauuc

SEQ ID NO: 6943 - RNA, 20 nt, Artificial Sequence
  targeting sequence with TTCN PAM
acaaaguccauuaguaugga

SEQ ID NO: 6944 - RNA, 20 nt, Artificial Sequence
  targeting sequence with TTCN PAM
cucugccaagccucacaaau

SEQ ID NO: 6945 - RNA, 20 nt, Artificial Sequence
  targeting sequence with TTCN PAM
agauuggcgagcugauaaag

SEQ ID NO: 6946 - RNA, 20 nt, Artificial Sequence
  targeting sequence with TTCN PAM
ccugauggaaaaaagcaaaa

SEQ ID NO: 6947 - RNA, 20 nt, Artificial Sequence
  targeting sequence with TTCN PAM
aucaggagaaaucccucccu

SEQ ID NO: 6948 - RNA, 20 nt, Artificial Sequence
  targeting sequence with TTCN PAM
auuuugcuuuuuuccaucag

SEQ ID NO: 6949 - RNA, 20 nt, Artificial Sequence
  targeting sequence with TTCN PAM
aauuuacaaaagaauguucu

SEQ ID NO: 6950 - RNA, 20 nt, Artificial Sequence
  targeting sequence with TTCN PAM
uuuguaaauuugaauuucua

SEQ ID NO: 6951 - RNA, 20 nt, Artificial Sequence
  targeting sequence with TTCN PAM
ccuuuccuaaucaaacuuac

SEQ ID NO: 6952 - RNA, 20 nt, Artificial Sequence
  targeting sequence with TTCN PAM
cuacuggggagcagucauua

SEQ ID NO: 6953 - RNA, 20 nt, Artificial Sequence
  targeting sequence with TTCN PAM
gauaugacuaaagcacuauu

SEQ ID NO: 6954 - RNA, 20 nt, Artificial Sequence
  targeting sequence with TTCN PAM
gguuauaaggaauaagaaau

SEQ ID NO: 6955 - RNA, 20 nt, Artificial Sequence
  targeting sequence with TTCN PAM
uuauaaccagaaaauagugc

SEQ ID NO: 6956 - RNA, 20 nt, Artificial Sequence
  targeting sequence with TTCN PAM
uauuccuuauaaccagaaaa

SEQ ID NO: 6957 - RNA, 20 nt, Artificial Sequence
  targeting sequence with TTCN PAM
cacuuguaaauacguugugu

SEQ ID NO: 6958 - RNA, 20 nt, Artificial Sequence
  targeting sequence with TTCN PAM
ggauaaaugugagacaguua

SEQ ID NO: 6959 - RNA, 20 nt, Artificial Sequence
  targeting sequence with TTCN PAM
aguuuaauaauuuuuaacug

SEQ ID NO: 6960 - RNA, 20 nt, Artificial Sequence
  targeting sequence with TTCN PAM
gagugggguuucuuuuuaaa

SEQ ID NO: 6961 - RNA, 20 nt, Artificial Sequence
  targeting sequence with TTCN PAM
uuuuaaaauucuuguuauau

SEQ ID NO: 6962 - RNA, 20 nt, Artificial Sequence
  targeting sequence with TTCN PAM
uguuauauaugaaauauaau

SEQ ID NO: 6963 - RNA, 20 nt, Artificial Sequence
  targeting sequence with TTCN PAM
uauauaacaagaauuuuaaa

SEQ ID NO: 6964 - RNA, 20 nt, Artificial Sequence
  targeting sequence with TTCN PAM
aguuuagugcaaguugagua

SEQ ID NO: 6965 - RNA, 20 nt, Artificial Sequence
  targeting sequence with TTCN PAM
uugaucucucuaguaagguu

SEQ ID NO: 6966 - RNA, 20 nt, Artificial Sequence
  targeting sequence with TTCN PAM
agacuauaaaagccuaaaaa

SEQ ID NO: 6967 - RNA, 20 nt, Artificial Sequence
  targeting sequence with TTCN PAM
gcuuuuuaggcuuuuauagu

SEQ ID NO: 6968 - RNA, 20 nt, Artificial Sequence
  targeting sequence with TTCN PAM
aggcacuguuuuaggugucg

SEQ ID NO: 6969 - RNA, 20 nt, Artificial Sequence
  targeting sequence with TTCN PAM
cugcugcguccucgacaccu

SEQ ID NO: 6970 - RNA, 20 nt, Artificial Sequence
  targeting sequence with TTCN PAM
guuuuguucacugcugcguc

SEQ ID NO: 6971 - RNA, 20 nt, Artificial Sequence
  targeting sequence with TTCN PAM
ucuguuuuguucacugcugc

SEQ ID NO: 6972 - RNA, 20 nt, Artificial Sequence
  targeting sequence with TTCN PAM
gguuaaaacuaaaaagugga

SEQ ID NO: 6973 - RNA, 20 nt, Artificial Sequence
  targeting sequence with TTCN PAM
gacaacuguuucaaggagcu

SEQ ID NO: 6974 - RNA, 20 nt, Artificial Sequence
  targeting sequence with TTCN PAM
aggagcuuugcugauuuugg

SEQ ID NO: 6975 - RNA, 20 nt, Artificial Sequence
  targeting sequence with TTCN PAM
aaaaucagcaaagcuccuug

SEQ ID NO: 6976 - RNA, 20 nt, Artificial Sequence
  targeting sequence with TTCN PAM
ccuuccaaaaucagcaaagc

SEQ ID NO: 6977 - RNA, 20 nt, Artificial Sequence
  targeting sequence with TTCN PAM
guuacugccccauucuccuu

SEQ ID NO: 6978 - RNA, 20 nt, Artificial Sequence
  targeting sequence with TTCN PAM
uguuuuuaaauggaaauuga

SEQ ID NO: 6979 - RNA, 20 nt, Artificial Sequence
  targeting sequence with TTCN PAM
auuuaaaaacaagaacuuaa

SEQ ID NO: 6980 - RNA, 20 nt, Artificial Sequence
  targeting sequence with TTCN PAM
uaugccauggagcagguacu

SEQ ID NO: 6981 - RNA, 20 nt, Artificial Sequence
  targeting sequence with TTCN PAM
ucauaugccauggagcaggu

SEQ ID NO: 6982 - RNA, 20 nt, Artificial Sequence
  targeting sequence with TTCN PAM
accagcuccagcagcagcag

SEQ ID NO: 6983 - RNA, 20 nt, Artificial Sequence
  targeting sequence with TTCN PAM
ucaaccagcuccagcagcag

SEQ ID NO: 6984 - RNA, 20 nt, Artificial Sequence
  targeting sequence with TTCN PAM
gcagauucuucaaccagcuc

SEQ ID NO: 6985 - RNA, 20 nt, Artificial Sequence
  targeting sequence with TTCN PAM
ggcagugggaccccaucugg

SEQ ID NO: 6986 - RNA, 20 nt, Artificial Sequence
  targeting sequence with TTCN PAM
cuguaaggauuuguucauca

SEQ ID NO: 6987 - RNA, 20 nt, Artificial Sequence
  targeting sequence with TTCN PAM
ucagaaaagcccaguuggug

SEQ ID NO: 6988 - RNA, 20 nt, Artificial Sequence
  targeting sequence with TTCN PAM
gaugaacaaauccuuacagu

SEQ ID NO: 6989 - RNA, 20 nt, Artificial Sequence
  targeting sequence with TTCN PAM
cugucagcugcaaaaagugg

SEQ ID NO: 6990 - RNA, 20 nt, Artificial Sequence
  targeting sequence with TTCN PAM
uaauuauugagaggaaaagg

SEQ ID NO: 6991 - RNA, 20 nt, Artificial Sequence
  targeting sequence with TTCN PAM
ucucaauaauuaagaaacca

SEQ ID NO: 6992 - RNA, 20 nt, Artificial Sequence
  targeting sequence with TTCN PAM
uuuuccucucaauaauuaag

SEQ ID NO: 6993 - RNA, 20 nt, Artificial Sequence
  targeting sequence with TTCN PAM
ucaaaacugcuuauuuaaac

SEQ ID NO: 6994 - RNA, 20 nt, Artificial Sequence
  targeting sequence with TTCN PAM
accggacacucccuaugguu

SEQ ID NO: 6995 - RNA, 20 nt, Artificial Sequence
  targeting sequence with TTCN PAM
uuacugugagccuguaaaau

SEQ ID NO: 6996 - RNA, 20 nt, Artificial Sequence
  targeting sequence with TTCN PAM
cucacaacguguuuaauuuu

SEQ ID NO: 6997 - RNA, 20 nt, Artificial Sequence
  targeting sequence with TTCN PAM
uuuauuuauucauuuaaaca

SEQ ID NO: 6998 - RNA, 20 nt, Artificial Sequence
  targeting sequence with TTCN PAM
uuucaggucuuuauucuaca

SEQ ID NO: 6999 - RNA, 20 nt, Artificial Sequence
  targeting sequence with TTCN PAM
ggucuuuauucuacauuugu

SEQ ID NO: 7000 - RNA, 20 nt, Artificial Sequence
  targeting sequence with TTCN PAM
acauuuguuuaccaaacuac

SEQ ID NO: 7001 - RNA, 20 nt, Artificial Sequence
  targeting sequence with TTCN PAM
uguugucuuauuauuuucau

SEQ ID NO: 7002 - RNA, 20 nt, Artificial Sequence
  targeting sequence with TTCN PAM
uaauguaaaccuaccucgac

SEQ ID NO: 7003 - RNA, 20 nt, Artificial Sequence
  targeting sequence with TTCN PAM
cugucgagguagguuuacau

SEQ ID NO: 7004 - RNA, 20 nt, Artificial Sequence
  targeting sequence with TTCN PAM
uggacaucuuuuaacccuua

SEQ ID NO: 7005 - RNA, 20 nt, Artificial Sequence
  targeting sequence with TTCN PAM
accucauggugccucauuuc

SEQ ID NO: 7006 - RNA, 20 nt, Artificial Sequence
  targeting sequence with TTCN PAM
uggaacagaguaaaaauccu

SEQ ID NO: 7007 - RNA, 20 nt, Artificial Sequence
  targeting sequence with TTCN PAM
acgaacuauucuaccucaug

SEQ ID NO: 7008 - RNA, 20 nt, Artificial Sequence
  targeting sequence with TTCN PAM
uuuuuuaaggauuuuuacuc

SEQ ID NO: 7009 - RNA, 20 nt, Artificial Sequence
  targeting sequence with TTCN PAM
uuuuuuuaagauguauguug

SEQ ID NO: 7010 - RNA, 20 nt, Artificial Sequence
  targeting sequence with TTCN PAM
ggcagagcgcuaugugauca

SEQ ID NO: 7011 - RNA, 20 nt, Artificial Sequence
  targeting sequence with TTCN PAM
aauacauuuuaauacuuuuu

SEQ ID NO: 7012 - RNA, 20 nt, Artificial Sequence
  targeting sequence with TTCN PAM
uucuugauaaauuaauggac

SEQ ID NO: 7013 - RNA, 20 nt, Artificial Sequence
  targeting sequence with TTCN PAM
gugaacacaugaaaucugac

SEQ ID NO: 7014 - RNA, 20 nt, Artificial Sequence
  targeting sequence with TTCN PAM
cagaauuguauaucauauuu

SEQ ID NO: 7015 - RNA, 20 nt, Artificial Sequence
  targeting sequence with TTCN PAM
uguguucacagaauuguaua

SEQ ID NO: 7016 - RNA, 20 nt, Artificial Sequence
  targeting sequence with TTCN PAM
gaacugccugagaauuagaa

SEQ ID NO: 7017 - RNA, 20 nt, Artificial Sequence
  targeting sequence with TTCN PAM
gaacuuugucagauuucaug

SEQ ID NO: 7018 - RNA, 20 nt, Artificial Sequence
  targeting sequence with TTCN PAM
caggcaguucagaacuuugu

SEQ ID NO: 7019 - RNA, 20 nt, Artificial Sequence
  targeting sequence with TTCN PAM
aauucucaggcaguucagaa

SEQ ID NO: 7020 - RNA, 20 nt, Artificial Sequence
  targeting sequence with TTCN PAM
auuaaauauacuuaacagag

SEQ ID NO: 7021 - RNA, 20 nt, Artificial Sequence
  targeting sequence with TTCN PAM
aaauuauuccagucuauggg

SEQ ID NO: 7022 - RNA, 20 nt, Artificial Sequence
  targeting sequence with TTCN PAM
agucuaugggcaagaacuag

SEQ ID NO: 7023 - RNA, 20 nt, Artificial Sequence
  targeting sequence with TTCN PAM
ugcccauagacuggaauaau

SEQ ID NO: 7024 - RNA, 20 nt, Artificial Sequence
  targeting sequence with TTCN PAM
aguucuugcccauagacugg

SEQ ID NO: 7025 - RNA, 20 nt, Artificial Sequence
  targeting sequence with TTCN PAM
aguucuaguucuugcccaua

SEQ ID NO: 7026 - RNA, 20 nt, Artificial Sequence
  targeting sequence with TTCN PAM
gacgaaaaauuuuuagaaaa

SEQ ID NO: 7027 - RNA, 20 nt, Artificial Sequence
  targeting sequence with TTCN PAM
ucugaauuucaaguucuagu

SEQ ID NO: 7028 - RNA, 20 nt, Artificial Sequence
  targeting sequence with TTCN PAM
aaaaauuuuucgucugaauu

SEQ ID NO: 7029 - RNA, 20 nt, Artificial Sequence
  targeting sequence with TTCN PAM
guauccauaauuguuccaac

SEQ ID NO: 7030 - RNA, 20 nt, Artificial Sequence
  targeting sequence with TTCN PAM
uuccaaacuagugaaaugag

SEQ ID NO: 7031 - RNA, 20 nt, Artificial Sequence
  targeting sequence with TTCN PAM
aaacuagugaaaugagauaa

SEQ ID NO: 7032 - RNA, 20 nt, Artificial Sequence
  targeting sequence with TTCN PAM
cuaguuuggaaagaacuuuu

SEQ ID NO: 7033 - RNA, 20 nt, Artificial Sequence
  targeting sequence with TTCN PAM
gguucaaauucgacuuugaa

SEQ ID NO: 7034 - RNA, 20 nt, Artificial Sequence
  targeting sequence with TTCN PAM
aauucgacuuugaagcuaua

SEQ ID NO: 7035 - RNA, 20 nt, Artificial Sequence
  targeting sequence with TTCN PAM
acuuugaagcuauauauucu

SEQ ID NO: 7036 - RNA, 20 nt, Artificial Sequence
  targeting sequence with TTCN PAM
uauuugguggacuacagaga

SEQ ID NO: 7037 - RNA, 20 nt, Artificial Sequence
  targeting sequence with TTCN PAM
gaauaaaaagcacuuaguaa

SEQ ID NO: 7038 - RNA, 20 nt, Artificial Sequence
  targeting sequence with TTCN PAM
gaaucauuucauauuuggug

SEQ ID NO: 7039 - RNA, 20 nt, Artificial Sequence
  targeting sequence with TTCN PAM
cuuuacuaagugcuuuuuau

SEQ ID NO: 7040 - RNA, 20 nt, Artificial Sequence
  targeting sequence with TTCN PAM
acucaugauaagaacacuaa

SEQ ID NO: 7041 - RNA, 20 nt, Artificial Sequence
  targeting sequence with TTCN PAM
gccauuuaaaaaagaagucu

SEQ ID NO: 7042 - RNA, 20 nt, Artificial Sequence
  targeting sequence with TTCN PAM
uuuuuaaauggcagaaguaa

SEQ ID NO: 7043 - RNA, 20 nt, Artificial Sequence
  targeting sequence with TTCN PAM
cagacuucuuuuuuaaaugg

SEQ ID NO: 7044 - RNA, 20 nt, Artificial Sequence
  targeting sequence with TTCN PAM
uucauauuaacaaaguacag

SEQ ID NO: 7045 - RNA, 20 nt, Artificial Sequence
  targeting sequence with TTCN PAM
uauuaacaaaguacagugac

SEQ ID NO: 7046 - RNA, 20 nt, Artificial Sequence
  targeting sequence with TTCN PAM
auucuucuuuuuuaaaauga

SEQ ID NO: 7047 - RNA, 20 nt, Artificial Sequence
  targeting sequence with TTCN PAM
uccauucuucuuuuuuaaaa

SEQ ID NO: 7048 - RNA, 20 nt, Artificial Sequence
  targeting sequence with TTCN PAM
ccuuuuuaaaggaaggcuuu

SEQ ID NO: 7049 - RNA, 20 nt, Artificial Sequence
  targeting sequence with TTCN PAM
uuuaaaaaggggaaucaaag

SEQ ID NO: 7050 - RNA, 20 nt, Artificial Sequence
  targeting sequence with TTCN PAM
uuugcuuguuaaagccuucc

SEQ ID NO: 7051 - RNA, 20 nt, Artificial Sequence
  targeting sequence with TTCN PAM
caacgggauauuccuuugcu

SEQ ID NO: 7052 - RNA, 20 nt, Artificial Sequence
  targeting sequence with TTCN PAM
uauucacaacgggauauucc

SEQ ID NO: 7053 - RNA, 20 nt, Artificial Sequence
  targeting sequence with TTCN PAM
agaguagagaaagacucuau

SEQ ID NO: 7054 - RNA, 20 nt, Artificial Sequence
  targeting sequence with TTCN PAM
cuacucuagaauggcuauuc

SEQ ID NO: 7055 - RNA, 20 nt, Artificial Sequence
  targeting sequence with TTCN PAM
cagagcacucgccaguuuuc

SEQ ID NO: 7056 - RNA, 20 nt, Artificial Sequence
  targeting sequence with TTCN PAM
cacaaacauuuggggauaaa

SEQ ID NO: 7057 - RNA, 20 nt, Artificial Sequence
  targeting sequence with TTCN PAM
cacuaaaaauuauuuugaaa

SEQ ID NO: 7058 - RNA, 20 nt, Artificial Sequence
  targeting sequence with TTCN PAM
aaauaauuuuuagugagaac

SEQ ID NO: 7059 - RNA, 20 nt, Artificial Sequence
  targeting sequence with TTCN PAM
aauaauaaaaguauuuuuca

SEQ ID NO: 7060 - RNA, 20 nt, Artificial Sequence
  targeting sequence with TTCN PAM
acuucauucugcuuacccua

SEQ ID NO: 7061 - RNA, 20 nt, Artificial Sequence
  targeting sequence with TTCN PAM
uucugcuuacccuauuaaug

SEQ ID NO: 7062 - RNA, 20 nt, Artificial Sequence
  targeting sequence with TTCN PAM
gcuuacccuauuaaugcccu

SEQ ID NO: 7063 - RNA, 20 nt, Artificial Sequence
  targeting sequence with TTCN PAM
aggagaaaagcuauaucuaa

SEQ ID NO: 7064 - RNA, 20 nt, Artificial Sequence
  targeting sequence with TTCN PAM
aaacaguaaguuauucauac

SEQ ID NO: 7065 - RNA, 20 nt, Artificial Sequence
  targeting sequence with TTCN PAM
uacuacauagaauaaaagua

SEQ ID NO: 7066 - RNA, 20 nt, Artificial Sequence
  targeting sequence with TTCN PAM
auguaguaugaauaacuuac

SEQ ID NO: 7067 - RNA, 20 nt, Artificial Sequence
  targeting sequence with TTCN PAM
uuuuacuuuuauucuaugua

SEQ ID NO: 7068 - RNA, 20 nt, Artificial Sequence
  targeting sequence with TTCN PAM
uguuuuaguuuuuauuugau

SEQ ID NO: 7069 - RNA, 20 nt, Artificial Sequence
  targeting sequence with TTCN PAM
cugucccuauccuucuaccu

SEQ ID NO: 7070 - RNA, 20 nt, Artificial Sequence
  targeting sequence with TTCN PAM
guguguaggucaucaccagg

SEQ ID NO: 7071 - RNA, 20 nt, Artificial Sequence
  targeting sequence with TTCN PAM
aaagaggcacagauucaggg

SEQ ID NO: 7072 - RNA, 20 nt, Artificial Sequence
  targeting sequence with TTCN PAM
gggauguaugauggggaaca

SEQ ID NO: 7073 - RNA, 20 nt, Artificial Sequence
  targeting sequence with TTCN PAM
cuucugaucacuuaccuaua

SEQ ID NO: 7074 - RNA, 20 nt, Artificial Sequence
  targeting sequence with TTCN PAM
gaucacuuaccuauaaggag

SEQ ID NO: 7075 - RNA, 20 nt, Artificial Sequence
  targeting sequence with TTCN PAM
gucuccuuauagguaaguga

SEQ ID NO: 7076 - RNA, 20 nt, Artificial Sequence
  targeting sequence with TTCN PAM
gcacuugguggccccacucu

SEQ ID NO: 7077 - RNA, 20 nt, Artificial Sequence
  targeting sequence with TTCN PAM
cuaucaggguuucucaaccu

SEQ ID NO: 7078 - RNA, 20 nt, Artificial Sequence
  targeting sequence with TTCN PAM
caaccuggacucuagugaca

SEQ ID NO: 7079 - RNA, 20 nt, Artificial Sequence
  targeting sequence with TTCN PAM
ggacaggauaauuugcuguu

SEQ ID NO: 7080 - RNA, 20 nt, Artificial Sequence
  targeting sequence with TTCN PAM
aauacuugaauuuuuuuuau

SEQ ID NO: 7081 - RNA, 20 nt, Artificial Sequence
  targeting sequence with TTCN PAM
aauaccccuuaugagguccc

SEQ ID NO: 7082 - RNA, 20 nt, Artificial Sequence
  targeting sequence with TTCN PAM
aguauucgaauaccccuuau

SEQ ID NO: 7083 - RNA, 20 nt, Artificial Sequence
  targeting sequence with TTCN PAM
auccaaauaugucauuauaa

SEQ ID NO: 7084 - RNA, 20 nt, Artificial Sequence
  targeting sequence with TTCN PAM
cuaauugugacuucuaucca

SEQ ID NO: 7085 - RNA, 20 nt, Artificial Sequence
  targeting sequence with TTCN PAM
aauaaguuaagcuuucuggu

SEQ ID NO: 7086 - RNA, 20 nt, Artificial Sequence
  targeting sequence with TTCN PAM
aaaagcauaaaaugcuacug

SEQ ID NO: 7087 - RNA, 20 nt, Artificial Sequence
  targeting sequence with TTCN PAM
guugauaugcuuaaguuuua

SEQ ID NO: 7088 - RNA, 20 nt, Artificial Sequence
  targeting sequence with TTCN PAM
uauucaguugauaugcuuaa

SEQ ID NO: 7089 - RNA, 20 nt, Artificial Sequence
  targeting sequence with TTCN PAM
agcaugacgguuaaagccuu

SEQ ID NO: 7090 - RNA, 20 nt, Artificial Sequence
  targeting sequence with TTCN PAM
aauggacaaagacaaccaau

SEQ ID NO: 7091 - RNA, 20 nt, Artificial Sequence
  targeting sequence with TTCN PAM
ccuaguuauaccauaaaugu

SEQ ID NO: 7092 - RNA, 20 nt, Artificial Sequence
  targeting sequence with TTCN PAM
uguuucaccuaguuauacca

SEQ ID NO: 7093 - RNA, 20 nt, Artificial Sequence
  targeting sequence with TTCN PAM
ucauguuucaccuaguuaua

SEQ ID NO: 7094 - RNA, 20 nt, Artificial Sequence
  targeting sequence with TTCN PAM
uaauuuuauauuuuuagaua

SEQ ID NO: 7095 - RNA, 20 nt, Artificial Sequence
  targeting sequence with TTCN PAM
uucauaauuuuauauuuuua

SEQ ID NO: 7096 - RNA, 20 nt, Artificial Sequence
  targeting sequence with TTCN PAM
aaucuuguguagcaaucagc

SEQ ID NO: 7097 - RNA, 20 nt, Artificial Sequence
  targeting sequence with TTCN PAM
uugcugauugcuacacaaga

SEQ ID NO: 7098 - RNA, 20 nt, Artificial Sequence
  targeting sequence with TTCN PAM
uauguaaagauacugaaucc

SEQ ID NO: 7099 - RNA, 20 nt, Artificial Sequence
  targeting sequence with TTCN PAM
guaucuuuacauaagaaauu

SEQ ID NO: 7100 - RNA, 20 nt, Artificial Sequence
  targeting sequence with TTCN PAM
ggauucaguaucuuuacaua

SEQ ID NO: 7101 - RNA, 20 nt, Artificial Sequence
  targeting sequence with TTCN PAM
auauacucuuucaggauuca

SEQ ID NO: 7102 - RNA, 20 nt, Artificial Sequence
  targeting sequence with TTCN PAM
ggacaaaauaucaaaauaaa

SEQ ID NO: 7103 - RNA, 20 nt, Artificial Sequence
  targeting sequence with TTCN PAM
uuauuuugauauuuuguccu

SEQ ID NO: 7104 - RNA, 20 nt, Artificial Sequence
  targeting sequence with TTCN PAM
uuccuuagauaccuaccuuc

SEQ ID NO: 7105 - RNA, 20 nt, Artificial Sequence
  targeting sequence with TTCN PAM
uuagauaccuaccuucuuua

SEQ ID NO: 7106 - RNA, 20 nt, Artificial Sequence
  targeting sequence with TTCN PAM
uuaaucuaggauuuagauua

SEQ ID NO: 7107 - RNA, 20 nt, Artificial Sequence
  targeting sequence with TTCN PAM
gcuaaucauaaacuauaguu

SEQ ID NO: 7108 - RNA, 20 nt, Artificial Sequence
  targeting sequence with TTCN PAM
uuagcaauuucuucaucagg

SEQ ID NO: 7109 - RNA, 20 nt, Artificial Sequence
  targeting sequence with TTCN PAM
ucaucaggugauuccauggc

SEQ ID NO: 7110 - RNA, 20 nt, Artificial Sequence
  targeting sequence with TTCN PAM
ucaggugauuccauggcuau

SEQ ID NO: 7111 - RNA, 20 nt, Artificial Sequence
  targeting sequence with TTCN PAM
auggcuauuuuccaaaugaa

SEQ ID NO: 7112 - RNA, 20 nt, Artificial Sequence
  targeting sequence with TTCN PAM
aaaugaaauccauuccuauc

SEQ ID NO: 7113 - RNA, 20 nt, Artificial Sequence
  targeting sequence with TTCN PAM
uuuggaaaauagccauggaa

SEQ ID NO: 7114 - RNA, 20 nt, Artificial Sequence
  targeting sequence with TTCN PAM
uaucaauuccagcuuuucua

SEQ ID NO: 7115 - RNA, 20 nt, Artificial Sequence
  targeting sequence with TTCN PAM
agcuuuucuacauacuguuc

SEQ ID NO: 7116 - RNA, 20 nt, Artificial Sequence
  targeting sequence with TTCN PAM
acauacuguucaaaagaaaa

SEQ ID NO: 7117 - RNA, 20 nt, Artificial Sequence
  targeting sequence with TTCN PAM
aaagaaaaaaaauuaaauua

SEQ ID NO: 7118 - RNA, 20 nt, Artificial Sequence
  targeting sequence with TTCN PAM
uuugaacaguauguagaaaa

SEQ ID NO: 7119 - RNA, 20 nt, Artificial Sequence
  targeting sequence with TTCN PAM
guucaauaugaauuaaggcu

SEQ ID NO: 7120 - RNA, 20 nt, Artificial Sequence
  targeting sequence with TTCN PAM
auaugaauuaaggcugcaaa

SEQ ID NO: 7121 - RNA, 20 nt, Artificial Sequence
  targeting sequence with TTCN PAM
uauugaacugaagaggugug

SEQ ID NO: 7122 - RNA, 20 nt, Artificial Sequence
  targeting sequence with TTCN PAM
uauagcugagguuuugcagc

SEQ ID NO: 7123 - RNA, 20 nt, Artificial Sequence
  targeting sequence with TTCN PAM
auaucaguauaauauuauuu

SEQ ID NO: 7124 - RNA, 20 nt, Artificial Sequence
  targeting sequence with TTCN PAM
gugguugguugcuuuuuaaa

SEQ ID NO: 7125 - RNA, 20 nt, Artificial Sequence
  targeting sequence with TTCN PAM
acgggaaccaggauagguac

SEQ ID NO: 7126 - RNA, 20 nt, Artificial Sequence
  targeting sequence with TTCN PAM
caaaucuagauaguuuggau

SEQ ID NO: 7127 - RNA, 20 nt, Artificial Sequence
  targeting sequence with TTCN PAM
aucgaugaucacaaagauuc

SEQ ID NO: 7128 - RNA, 20 nt, Artificial Sequence
  targeting sequence with TTCN PAM
cauuuucaaaaaaaguuuua

SEQ ID NO: 7129 - RNA, 20 nt, Artificial Sequence
  targeting sequence with TTCN PAM
aaaaaaguuuuaaauaaguu

SEQ ID NO: 7130 - RNA, 20 nt, Artificial Sequence
  targeting sequence with TTCN PAM
auaauuacagguuuuaacuu

SEQ ID NO: 7131 - RNA, 20 nt, Artificial Sequence
  targeting sequence with TTCN PAM
uguacucuacguaacacaga

SEQ ID NO: 7132 - RNA, 20 nt, Artificial Sequence
  targeting sequence with TTCN PAM
cauccucaacaauacuuguu

SEQ ID NO: 7133 - RNA, 20 nt, Artificial Sequence
  targeting sequence with TTCN PAM
ucacauccucaacaauacuu

SEQ ID NO: 7134 - RNA, 20 nt, Artificial Sequence
  targeting sequence with TTCN PAM
aauuucuucacauccucaac

SEQ ID NO: 7135 - RNA, 20 nt, Artificial Sequence
  targeting sequence with TTCN PAM
uaaucccaccagcaauauau

SEQ ID NO: 7136 - RNA, 20 nt, Artificial Sequence
  targeting sequence with TTCN PAM
ugaaagguuaauuauauguc

SEQ ID NO: 7137 - RNA, 20 nt, Artificial Sequence
  targeting sequence with TTCN PAM
ggaacugucuguuuugcaaa

SEQ ID NO: 7138 - RNA, 20 nt, Artificial Sequence
  targeting sequence with TTCN PAM
gacauauaauuaaccuuuca

SEQ ID NO: 7139 - RNA, 20 nt, Artificial Sequence
  targeting sequence with TTCN PAM
agauauacauccaagagaaa

SEQ ID NO: 7140 - RNA, 20 nt, Artificial Sequence
  targeting sequence with TTCN PAM
cuuggauguauaucuagaag

SEQ ID NO: 7141 - RNA, 20 nt, Artificial Sequence
  targeting sequence with TTCN PAM
uguagaaaggaauuugagua

SEQ ID NO: 7142 - RNA, 20 nt, Artificial Sequence
  targeting sequence with TTCN PAM
acaugaaugguaucuuauaa

SEQ ID NO: 7143 - RNA, 20 nt, Artificial Sequence
  targeting sequence with TTCN PAM
uuucuacaugaaugguaucu

SEQ ID NO: 7144 - RNA, 20 nt, Artificial Sequence
  targeting sequence with TTCN PAM
guacuuuuaaguaagaagug

SEQ ID NO: 7145 - RNA, 20 nt, Artificial Sequence
  targeting sequence with TTCN PAM
uaccauucauagugauuuca

SEQ ID NO: 7146 - RNA, 20 nt, Artificial Sequence
  targeting sequence with TTCN PAM
uagugauuucauaugacucc

SEQ ID NO: 7147 - RNA, 20 nt, Artificial Sequence
  targeting sequence with TTCN PAM
uaugacuccaauuuaagaau

SEQ ID NO: 7148 - RNA, 20 nt, Artificial Sequence
  targeting sequence with TTCN PAM
uaaauuggagucauaugaaa

SEQ ID NO: 7149 - RNA, 20 nt, Artificial Sequence
  targeting sequence with TTCN PAM
ccuugaagagcugcugcuga

SEQ ID NO: 7150 - RNA, 20 nt, Artificial Sequence
  targeting sequence with TTCN PAM
aggagaaaauucuuaaauug

SEQ ID NO: 7151 - RNA, 20 nt, Artificial Sequence
  targeting sequence with TTCN PAM
gcagcagcucuucaaggaga

SEQ ID NO: 7152 - RNA, 20 nt, Artificial Sequence
  targeting sequence with TTCN PAM
aaacacaucuguggaauaag

SEQ ID NO: 7153 - RNA, 20 nt, Artificial Sequence
  targeting sequence with TTCN PAM
acagauguguuuugaauggu

SEQ ID NO: 7154 - RNA, 20 nt, Artificial Sequence
  targeting sequence with TTCN PAM
ucuuauuccacagauguguu

SEQ ID NO: 7155 - RNA, 20 nt, Artificial Sequence
  targeting sequence with TTCN PAM
aagcauuuuagcuuugagug

SEQ ID NO: 7156 - RNA, 20 nt, Artificial Sequence
  targeting sequence with TTCN PAM
gaaauuaaaugaagcaguua

SEQ ID NO: 7157 - RNA, 20 nt, Artificial Sequence
  targeting sequence with TTCN PAM
gaauuccaagcauuuuagcu

SEQ ID NO: 7158 - RNA, 20 nt, Artificial Sequence
  targeting sequence with TTCN PAM
uuuaauuucagaauuccaag

SEQ ID NO: 7159 - RNA, 20 nt, Artificial Sequence
  targeting sequence with TTCN PAM
gccuuacuuuauccacaaua

SEQ ID NO: 7160 - RNA, 20 nt, Artificial Sequence
  targeting sequence with TTCN PAM
uaccucucuaucuaauucac

SEQ ID NO: 7161 - RNA, 20 nt, Artificial Sequence
  targeting sequence with TTCN PAM
caaacauccuggccaguuac

SEQ ID NO: 7162 - RNA, 20 nt, Artificial Sequence
  targeting sequence with TTCN PAM
agcccagauacagaguagcu

SEQ ID NO: 7163 - RNA, 20 nt, Artificial Sequence
  targeting sequence with TTCN PAM
ugcaagaaaaacgcuagaaa

SEQ ID NO: 7164 - RNA, 20 nt, Artificial Sequence
  targeting sequence with TTCN PAM
ugcaagaagcuacucuguau

SEQ ID NO: 7165 - RNA, 20 nt, Artificial Sequence
  targeting sequence with TTCN PAM
agcguuuuucuugcaagaag

SEQ ID NO: 7166 - RNA, 20 nt, Artificial Sequence
  targeting sequence with TTCN PAM
uuuugcaguauuuagaggca

SEQ ID NO: 7167 - RNA, 20 nt, Artificial Sequence
  targeting sequence with TTCN PAM
uuccuaaaagcaacauuaaa

SEQ ID NO: 7168 - RNA, 20 nt, Artificial Sequence
  targeting sequence with TTCN PAM
uaaaagcaacauuaaaacaa

SEQ ID NO: 7169 - RNA, 20 nt, Artificial Sequence
  targeting sequence with TTCN PAM
ugauuuacaacauuaauuug

SEQ ID NO: 7170 - RNA, 20 nt, Artificial Sequence
  targeting sequence with TTCN PAM
cguuaccaauuucacuauuu

SEQ ID NO: 7171 - RNA, 20 nt, Artificial Sequence
  targeting sequence with TTCN PAM
cuauuucaaaauucuucuuc

SEQ ID NO: 7172 - RNA, 20 nt, Artificial Sequence
  targeting sequence with TTCN PAM
aaauucuucuucaagucuug

SEQ ID NO: 7173 - RNA, 20 nt, Artificial Sequence
  targeting sequence with TTCN PAM
ucuucaagucuugaauaaug

SEQ ID NO: 7174 - RNA, 20 nt, Artificial Sequence
  targeting sequence with TTCN PAM
ucaagucuugaauaaugcuc

SEQ ID NO: 7175 - RNA, 20 nt, Artificial Sequence
  targeting sequence with TTCN PAM
agucuugaauaaugcucuug

SEQ ID NO: 7176 - RNA, 20 nt, Artificial Sequence
  targeting sequence with TTCN PAM
agacuugaagaagaauuuug

SEQ ID NO: 7177 - RNA, 20 nt, Artificial Sequence
  targeting sequence with TTCN PAM
ccaagagcauuauucaagac

SEQ ID NO: 7178 - RNA, 20 nt, Artificial Sequence
  targeting sequence with TTCN PAM
uuuuguuauuuucgccaaga

SEQ ID NO: 7179 - RNA, 20 nt, Artificial Sequence
  targeting sequence with TTCN PAM
cauuaccacuuuucuuuuug

SEQ ID NO: 7180 - RNA, 20 nt, Artificial Sequence
  targeting sequence with TTCN PAM
uaaaacaaaccuaucaaaag

SEQ ID NO: 7181 - RNA, 20 nt, Artificial Sequence
  targeting sequence with TTCN PAM
uggagcugacgcaaagcugg

SEQ ID NO: 7182 - RNA, 20 nt, Artificial Sequence
  targeting sequence with TTCN PAM
uuuuaacucuagucaucuca

SEQ ID NO: 7183 - RNA, 20 nt, Artificial Sequence
  targeting sequence with TTCN PAM
aaauuuaauuaauguaacuu

SEQ ID NO: 7184 - RNA, 20 nt, Artificial Sequence
  targeting sequence with TTCN PAM
uuuauuagcuauaaaaaauu

SEQ ID NO: 7185 - RNA, 20 nt, Artificial Sequence
  targeting sequence with TTCN PAM
agucaaucagguuuacuguu

SEQ ID NO: 7186 - RNA, 20 nt, Artificial Sequence
  targeting sequence with TTCN PAM
gucuucaacuucuuauucug

SEQ ID NO: 7187 - RNA, 20 nt, Artificial Sequence
  targeting sequence with TTCN PAM
acuucuuauucugcaugcaa

SEQ ID NO: 7188 - RNA, 20 nt, Artificial Sequence
  targeting sequence with TTCN PAM
uauucugcaugcaauuuccu

SEQ ID NO: 7189 - RNA, 20 nt, Artificial Sequence
  targeting sequence with TTCN PAM
gcaugcaauuuccuaaagcu

SEQ ID NO: 7190 - RNA, 20 nt, Artificial Sequence
  targeting sequence with TTCN PAM
uaaagcuaagaacugcaaac

SEQ ID NO: 7191 - RNA, 20 nt, Artificial Sequence
  targeting sequence with TTCN PAM
uagcuuuaggaaauugcaug

SEQ ID NO: 7192 - RNA, 20 nt, Artificial Sequence
  targeting sequence with TTCN PAM
cauccacuccuguuugcagu

SEQ ID NO: 7193 - RNA, 20 nt, Artificial Sequence
  targeting sequence with TTCN PAM
uuguugucuguuuuuugcug

SEQ ID NO: 7194 - RNA, 20 nt, Artificial Sequence
  targeting sequence with TTCN PAM
gaggauagauuaaguagcac

SEQ ID NO: 7195 - RNA, 20 nt, Artificial Sequence
  targeting sequence with TTCN PAM
guguuauccaaguuaagcuu

SEQ ID NO: 7196 - RNA, 20 nt, Artificial Sequence
  targeting sequence with TTCN PAM
uacuccauuuuacuuaccau

SEQ ID NO: 7197 - RNA, 20 nt, Artificial Sequence
  targeting sequence with TTCN PAM
augauuauaugacuaggaua

SEQ ID NO: 7198 - RNA, 20 nt, Artificial Sequence
  targeting sequence with TTCN PAM
uuaauauuuagaccacuacc

SEQ ID NO: 7199 - RNA, 20 nt, Artificial Sequence
  targeting sequence with TTCN PAM
uaaucuguauuuccuaguua

SEQ ID NO: 7200 - RNA, 20 nt, Artificial Sequence
  targeting sequence with TTCN PAM
uaguuaaaacacuuucauaa

SEQ ID NO: 7201 - RNA, 20 nt, Artificial Sequence
  targeting sequence with TTCN PAM
uaagagguaauucuauuuuu

SEQ ID NO: 7202 - RNA, 20 nt, Artificial Sequence
  targeting sequence with TTCN PAM
auuuuuauuauuacagacau

SEQ ID NO: 7203 - RNA, 20 nt, Artificial Sequence
  targeting sequence with TTCN PAM
aaacacuuccaaauauauua

SEQ ID NO: 7204 - RNA, 20 nt, Artificial Sequence
  targeting sequence with TTCN PAM
aaauauauuauuucugaaac

SEQ ID NO: 7205 - RNA, 20 nt, Artificial Sequence
  targeting sequence with TTCN PAM
gaaacugguauaugacaauc

SEQ ID NO: 7206 - RNA, 20 nt, Artificial Sequence
  targeting sequence with TTCN PAM
gaaauaauauauuuggaagu

SEQ ID NO: 7207 - RNA, 20 nt, Artificial Sequence
  targeting sequence with TTCN PAM
cuuuauaaagaguauuacac

SEQ ID NO: 7208 - RNA, 20 nt, Artificial Sequence
  targeting sequence with TTCN PAM
aacuaugaaauuucaaaauu

SEQ ID NO: 7209 - RNA, 20 nt, Artificial Sequence
  targeting sequence with TTCN PAM
uaguuugaaagaugcuauuu

SEQ ID NO: 7210 - RNA, 20 nt, Artificial Sequence
  targeting sequence with TTCN PAM
aaauuugguaagaauuucag

SEQ ID NO: 7211 - RNA, 20 nt, Artificial Sequence
  targeting sequence with TTCN PAM
uaccaaauuuugaaauuuca

SEQ ID NO: 7212 - RNA, 20 nt, Artificial Sequence
  targeting sequence with TTCN PAM
guuuaaacaugacuauuaaa

SEQ ID NO: 7213 - RNA, 20 nt, Artificial Sequence
  targeting sequence with TTCN PAM
ccuccacaagggucuucauc

SEQ ID NO: 7214 - RNA, 20 nt, Artificial Sequence
  targeting sequence with TTCN PAM
cuacaaagacaacaaaagug

SEQ ID NO: 7215 - RNA, 20 nt, Artificial Sequence
  targeting sequence with TTCN PAM
auagugagauguuucucuac

SEQ ID NO: 7216 - RNA, 20 nt, Artificial Sequence
  targeting sequence with TTCN PAM
uugccucauagggaucagcc

SEQ ID NO: 7217 - RNA, 20 nt, Artificial Sequence
  targeting sequence with TTCN PAM
uagauucuaagacaaagauu

SEQ ID NO: 7218 - RNA, 20 nt, Artificial Sequence
  targeting sequence with TTCN PAM
aagacaaagauuucauauau

SEQ ID NO: 7219 - RNA, 20 nt, Artificial Sequence
  targeting sequence with TTCN PAM
uauauuuuaacauaucugaa

SEQ ID NO: 7220 - RNA, 20 nt, Artificial Sequence
  targeting sequence with TTCN PAM
gauauguuaaaauauaugaa

SEQ ID NO: 7221 - RNA, 20 nt, Artificial Sequence
  targeting sequence with TTCN PAM
uuugacauaauugucuaaag

SEQ ID NO: 7222 - RNA, 20 nt, Artificial Sequence
  targeting sequence with TTCN PAM
gaagucaggagaagcuggca

SEQ ID NO: 7223 - RNA, 20 nt, Artificial Sequence
  targeting sequence with TTCN PAM
gaaaaugcuuuagugugaga

SEQ ID NO: 7224 - RNA, 20 nt, Artificial Sequence
  targeting sequence with TTCN PAM
ccugacuucggaaaaugcuu

SEQ ID NO: 7225 - RNA, 20 nt, Artificial Sequence
  targeting sequence with TTCN PAM
caggguaugagucugucaug

SEQ ID NO: 7226 - RNA, 20 nt, Artificial Sequence
  targeting sequence with TTCN PAM
agagaagguguuuaacuugu

SEQ ID NO: 7227 - RNA, 20 nt, Artificial Sequence
  targeting sequence with TTCN PAM
cuugaaauaaggugcagcuu

SEQ ID NO: 7228 - RNA, 20 nt, Artificial Sequence
  targeting sequence with TTCN PAM
uaauugaguuauguacacua

SEQ ID NO: 7229 - RNA, 20 nt, Artificial Sequence
  targeting sequence with TTCN PAM
cuuuuguaaaacucaacuug

SEQ ID NO: 7230 - RNA, 20 nt, Artificial Sequence
  targeting sequence with TTCN PAM
ucaacaugccucaaaauuau

SEQ ID NO: 7231 - RNA, 20 nt, Artificial Sequence
  targeting sequence with TTCN PAM
aagaugccagugauugcacc

SEQ ID NO: 7232 - RNA, 20 nt, Artificial Sequence
  targeting sequence with TTCN PAM
gugauucuaagaugccagug

SEQ ID NO: 7233 - RNA, 20 nt, Artificial Sequence
  targeting sequence with TTCN PAM
ggcuacacuauaaaaguugc

SEQ ID NO: 7234 - RNA, 20 nt, Artificial Sequence
  targeting sequence with TTCN PAM
caaaaggauuacaaaauugg

SEQ ID NO: 7235 - RNA, 20 nt, Artificial Sequence
  targeting sequence with TTCN PAM
uauuuaugucccaauuuugu

SEQ ID NO: 7236 - RNA, 20 nt, Artificial Sequence
  targeting sequence with TTCN PAM
gcaagaagcaaauauauuaa

SEQ ID NO: 7237 - RNA, 20 nt, Artificial Sequence
  targeting sequence with TTCN PAM
ugcugaagaguucauauuua

SEQ ID NO: 7238 - RNA, 20 nt, Artificial Sequence
  targeting sequence with TTCN PAM
auauuaaauaaaaauauugu

SEQ ID NO: 7239 - RNA, 20 nt, Artificial Sequence
  targeting sequence with TTCN PAM
aaggauaauuuucaauauua

SEQ ID NO: 7240 - RNA, 20 nt, Artificial Sequence
  targeting sequence with TTCN PAM
aagaaaaagucuauaaaacu

SEQ ID NO: 7241 - RNA, 20 nt, Artificial Sequence
  targeting sequence with TTCN PAM
uugaauuuuauuguauaaca

SEQ ID NO: 7242 - RNA, 20 nt, Artificial Sequence
  targeting sequence with TTCN PAM
uaaauuuuaguuuuauagac

SEQ ID NO: 7243 - RNA, 20 nt, Artificial Sequence
  targeting sequence with TTCN PAM
gauauagccuucuuaaaguu

SEQ ID NO: 7244 - RNA, 20 nt, Artificial Sequence
  targeting sequence with TTCN PAM
uaaaguuuagcaaacaggaa

SEQ ID NO: 7245 - RNA, 20 nt, Artificial Sequence
  targeting sequence with TTCN PAM
uguuugcuaaacuuuaagaa

SEQ ID NO: 7246 - RNA, 20 nt, Artificial Sequence
  targeting sequence with TTCN PAM
ucuuaucuaugacgugguga

SEQ ID NO: 7247 - RNA, 20 nt, Artificial Sequence
  targeting sequence with TTCN PAM
uauaacuugucaccacguca

SEQ ID NO: 7248 - RNA, 20 nt, Artificial Sequence
  targeting sequence with TTCN PAM
ccaauuacaaugaagauauc

SEQ ID NO: 7249 - RNA, 20 nt, Artificial Sequence
  targeting sequence with TTCN PAM
uuguaauuggagaagaguaa

SEQ ID NO: 7250 - RNA, 20 nt, Artificial Sequence
  targeting sequence with TTCN PAM
uaaguaggaccugaugggau

SEQ ID NO: 7251 - RNA, 20 nt, Artificial Sequence
  targeting sequence with TTCN PAM
ucuaauguugaguccaauuu

SEQ ID NO: 7252 - RNA, 20 nt, Artificial Sequence
  targeting sequence with CTCN PAM
augacauucugaugauucag

SEQ ID NO: 7253 - RNA, 20 nt, Artificial Sequence
  targeting sequence with CTCN PAM
uuuaaacuagauucugaucc

SEQ ID NO: 7254 - RNA, 20 nt, Artificial Sequence
  targeting sequence with CTCN PAM
gcuuugcgcuugaauuaacu

SEQ ID NO: 7255 - RNA, 20 nt, Artificial Sequence
  targeting sequence with CTCN PAM
aaauggaauggggccagugu

SEQ ID NO: 7256 - RNA, 20 nt, Artificial Sequence
  targeting sequence with CTCN PAM
gugguaagaauuaggaugga

SEQ ID NO: 7257 - RNA, 20 nt, Artificial Sequence
  targeting sequence with CTCN PAM
uacacauaaaaaguuguauc

SEQ ID NO: 7258 - RNA, 20 nt, Artificial Sequence
  targeting sequence with CTCN PAM
uaggauacaacuuuuuaugu

SEQ ID NO: 7259 - RNA, 20 nt, Artificial Sequence
  targeting sequence with CTCN PAM
ccuaggauacaacuuuuuau

SEQ ID NO: 7260 - RNA, 20 nt, Artificial Sequence
  targeting sequence with CTCN PAM
uugucaacugucacugacau

SEQ ID NO: 7261 - RNA, 20 nt, Artificial Sequence
  targeting sequence with CTCN PAM
ccuugucaacugucacugac

SEQ ID NO: 7262 - RNA, 20 nt, Artificial Sequence
  targeting sequence with CTCN PAM
ucuggaagaagaugcccaau

SEQ ID NO: 7263 - RNA, 20 nt, Artificial Sequence
  targeting sequence with CTCN PAM
ccaguaauuuuuauauuucu

SEQ ID NO: 7264 - RNA, 20 nt, Artificial Sequence
  targeting sequence with CTCN PAM
aguaauuuuuauauuucuca

SEQ ID NO: 7265 - RNA, 20 nt, Artificial Sequence
  targeting sequence with CTCN PAM
guccaacccauuccugaauc

SEQ ID NO: 7266 - RNA, 20 nt, Artificial Sequence
  targeting sequence with CTCN PAM
uccuuucuuccuaguuucau

SEQ ID NO: 7267 - RNA, 20 nt, Artificial Sequence
  targeting sequence with CTCN PAM
auauaguaaggaaagaaaaa

SEQ ID NO: 7268 - RNA, 20 nt, Artificial Sequence
  targeting sequence with CTCN PAM
cuuaaaggaagcacucuccu

SEQ ID NO: 7269 - RNA, 20 nt, Artificial Sequence
  targeting sequence with CTCN PAM
ccucacaggucucccugaag

SEQ ID NO: 7270 - RNA, 20 nt, Artificial Sequence
  targeting sequence with CTCN PAM
ucacaggucucccugaagcc

SEQ ID NO: 7271 - RNA, 20 nt, Artificial Sequence
  targeting sequence with CTCN PAM
caggucucccugaagccauc

SEQ ID NO: 7272 - RNA, 20 nt, Artificial Sequence
  targeting sequence with CTCN PAM
cugaagccaucgugcccacu

SEQ ID NO: 7273 - RNA, 20 nt, Artificial Sequence
  targeting sequence with CTCN PAM
aauucauccuccauguggca

SEQ ID NO: 7274 - RNA, 20 nt, Artificial Sequence
  targeting sequence with CTCN PAM
auguggcaccgaguggucuu

SEQ ID NO: 7275 - RNA, 20 nt, Artificial Sequence
  targeting sequence with CTCN PAM
aggucuuuguacauaccauu

SEQ ID NO: 7276 - RNA, 20 nt, Artificial Sequence
  targeting sequence with CTCN PAM
cucauuuagacauucuucag

SEQ ID NO: 7277 - RNA, 20 nt, Artificial Sequence
  targeting sequence with CTCN PAM
cauuuagacauucuucagaa

SEQ ID NO: 7278 - RNA, 20 nt, Artificial Sequence
  targeting sequence with CTCN PAM
uuuagacauucuucagaacu

SEQ ID NO: 7279 - RNA, 20 nt, Artificial Sequence
  targeting sequence with CTCN PAM
gcucaaaaguuacuuccuca

SEQ ID NO: 7280 - RNA, 20 nt, Artificial Sequence
  targeting sequence with CTCN PAM
aaaguuacuuccucaaggaa

SEQ ID NO: 7281 - RNA, 20 nt, Artificial Sequence
  targeting sequence with CTCN PAM
aggaagccuuuccugacauu

SEQ ID NO: 7282 - RNA, 20 nt, Artificial Sequence
  targeting sequence with CTCN PAM
guaaagauacccaaaaaugu

SEQ ID NO: 7283 - RNA, 20 nt, Artificial Sequence
  targeting sequence with CTCN PAM
gaagaagacaggaaaaugug

SEQ ID NO: 7284 - RNA, 20 nt, Artificial Sequence
  targeting sequence with CTCN PAM
aggaaguuccaaacuuuccc

SEQ ID NO: 7285 - RNA, 20 nt, Artificial Sequence
  targeting sequence with CTCN PAM
gccuggauuucauuguccau

SEQ ID NO: 7286 - RNA, 20 nt, Artificial Sequence
  targeting sequence with CTCN PAM
gauggagaugaggaacuugu

SEQ ID NO: 7287 - RNA, 20 nt, Artificial Sequence
  targeting sequence with CTCN PAM
aucugagacuaccucagccu

SEQ ID NO: 7288 - RNA, 20 nt, Artificial Sequence
  targeting sequence with CTCN PAM
ucuccaucugagacuaccuc

SEQ ID NO: 7289 - RNA, 20 nt, Artificial Sequence
  targeting sequence with CTCN PAM
aguucccaacaaguuccuca

SEQ ID NO: 7290 - RNA, 20 nt, Artificial Sequence
  targeting sequence with CTCN PAM
ugcuauauuuuaguaaacag

SEQ ID NO: 7291 - RNA, 20 nt, Artificial Sequence
  targeting sequence with CTCN PAM
aaggcaggggcaaaaugcca

SEQ ID NO: 7292 - RNA, 20 nt, Artificial Sequence
  targeting sequence with CTCN PAM
ugaaugcuuugcugcuuaga

SEQ ID NO: 7293 - RNA, 20 nt, Artificial Sequence
  targeting sequence with CTCN PAM
acuucauuuuaaaacugaau

SEQ ID NO: 7294 - RNA, 20 nt, Artificial Sequence
  targeting sequence with CTCN PAM
gaaaauggguuuuucuuuuc

SEQ ID NO: 7295 - RNA, 20 nt, Artificial Sequence
  targeting sequence with CTCN PAM
ugugucagcaugacccggcu

SEQ ID NO: 7296 - RNA, 20 nt, Artificial Sequence
  targeting sequence with CTCN PAM
cagccgggucaugcugacac

SEQ ID NO: 7297 - RNA, 20 nt, Artificial Sequence
  targeting sequence with CTCN PAM
augucucacagccgggucau

SEQ ID NO: 7298 - RNA, 20 nt, Artificial Sequence
  targeting sequence with CTCN PAM
uuucacuccaugucucacag

SEQ ID NO: 7299 - RNA, 20 nt, Artificial Sequence
  targeting sequence with CTCN PAM
aaaaugaucuccuuucacuc

SEQ ID NO: 7300 - RNA, 20 nt, Artificial Sequence
  targeting sequence with CTCN PAM
caaaguauugggauuacagg

SEQ ID NO: 7301 - RNA, 20 nt, Artificial Sequence
  targeting sequence with CTCN PAM
accucccaaaguauugggau

SEQ ID NO: 7302 - RNA, 20 nt, Artificial Sequence
  targeting sequence with CTCN PAM
agugauccacccaccucaac

SEQ ID NO: 7303 - RNA, 20 nt, Artificial Sequence
  targeting sequence with CTCN PAM
ugggcucaagugauccaccc

SEQ ID NO: 7304 - RNA, 20 nt, Artificial Sequence
  targeting sequence with CTCN PAM
aacuccugggcucaagugau

SEQ ID NO: 7305 - RNA, 20 nt, Artificial Sequence
  targeting sequence with CTCN PAM
ugggguuaaaaacgaaagcu

SEQ ID NO: 7306 - RNA, 20 nt, Artificial Sequence
  targeting sequence with CTCN PAM
cccugugaggccacaaggug

SEQ ID NO: 7307 - RNA, 20 nt, Artificial Sequence
  targeting sequence with CTCN PAM
cugugaggccacaagguggc

SEQ ID NO: 7308 - RNA, 20 nt, Artificial Sequence
  targeting sequence with CTCN PAM
cagggagagcuuucguuuuu

SEQ ID NO: 7309 - RNA, 20 nt, Artificial Sequence
  targeting sequence with CTCN PAM
uugacuugcugcuuugugcu

SEQ ID NO: 7310 - RNA, 20 nt, Artificial Sequence
  targeting sequence with CTCN PAM
acugccuucuugagaggacc

SEQ ID NO: 7311 - RNA, 20 nt, Artificial Sequence
  targeting sequence with CTCN PAM
cgccuauaaucccagcacuu

SEQ ID NO: 7312 - RNA, 20 nt, Artificial Sequence
  targeting sequence with CTCN PAM
uuaguuuccuaaaaugaaca

SEQ ID NO: 7313 - RNA, 20 nt, Artificial Sequence
  targeting sequence with CTCN PAM
ucuaaauuggguuuuaacag

SEQ ID NO: 7314 - RNA, 20 nt, Artificial Sequence
  targeting sequence with CTCN PAM
ggaaaaaaaaaaaaucaauu

SEQ ID NO: 7315 - RNA, 20 nt, Artificial Sequence
  targeting sequence with CTCN PAM
guggcaaaaugaaagcaggc

SEQ ID NO: 7316 - RNA, 20 nt, Artificial Sequence
  targeting sequence with CTCN PAM
gggccuuguuuaacucugug

SEQ ID NO: 7317 - RNA, 20 nt, Artificial Sequence
  targeting sequence with CTCN PAM
cugggccuuguuuaacucug

SEQ ID NO: 7318 - RNA, 20 nt, Artificial Sequence
  targeting sequence with CTCN PAM
accacauaguuugcugugua

SEQ ID NO: 7319 - RNA, 20 nt, Artificial Sequence
  targeting sequence with CTCN PAM
cugccaaguacuccuuuuca

SEQ ID NO: 7320 - RNA, 20 nt, Artificial Sequence
  targeting sequence with CTCN PAM
ccaucacucccugccaagua

SEQ ID NO: 7321 - RNA, 20 nt, Artificial Sequence
  targeting sequence with CTCN PAM
ccccuucuccccaucacucc

SEQ ID NO: 7322 - RNA, 20 nt, Artificial Sequence
  targeting sequence with CTCN PAM
uuuccagaaaccaaggaagu

SEQ ID NO: 7323 - RNA, 20 nt, Artificial Sequence
  targeting sequence with CTCN PAM
guguguuugcagcugcucca

SEQ ID NO: 7324 - RNA, 20 nt, Artificial Sequence
  targeting sequence with CTCN PAM
agguuauguggagauugucu

SEQ ID NO: 7325 - RNA, 20 nt, Artificial Sequence
  targeting sequence with CTCN PAM
acauaaccuggagcagcugc

SEQ ID NO: 7326 - RNA, 20 nt, Artificial Sequence
  targeting sequence with CTCN PAM
cggggccugggaagcacaau

SEQ ID NO: 7327 - RNA, 20 nt, Artificial Sequence
  targeting sequence with CTCN PAM
auuaccgcaacuccucaauu

SEQ ID NO: 7328 - RNA, 20 nt, Artificial Sequence
  targeting sequence with CTCN PAM
ucaauuagacaugugauggc

SEQ ID NO: 7329 - RNA, 20 nt, Artificial Sequence
  targeting sequence with CTCN PAM
auuagacaugugauggcgga

SEQ ID NO: 7330 - RNA, 20 nt, Artificial Sequence
  targeting sequence with CTCN PAM
cgcagccugggaaacagggu

SEQ ID NO: 7331 - RNA, 20 nt, Artificial Sequence
  targeting sequence with CTCN PAM
cugagcauuucggcgucaga

SEQ ID NO: 7332 - RNA, 20 nt, Artificial Sequence
  targeting sequence with CTCN PAM
gggagacggauuugaguaau

SEQ ID NO: 7333 - RNA, 20 nt, Artificial Sequence
  targeting sequence with CTCN PAM
gacgccgaaaugcucaggga

SEQ ID NO: 7334 - RNA, 20 nt, Artificial Sequence
  targeting sequence with CTCN PAM
ccacuuccgaagccccuacc

SEQ ID NO: 7335 - RNA, 20 nt, Artificial Sequence
  targeting sequence with CTCN PAM
ccaaccagcacuccccacuu

SEQ ID NO: 7336 - RNA, 20 nt, Artificial Sequence
  targeting sequence with CTCN PAM
aaucucaccaaccagcacuc

SEQ ID NO: 7337 - RNA, 20 nt, Artificial Sequence
  targeting sequence with CTCN PAM
accaguucugccaucccacc

SEQ ID NO: 7338 - RNA, 20 nt, Artificial Sequence
  targeting sequence with CTCN PAM
auggaucagcugacaccacc

SEQ ID NO: 7339 - RNA, 20 nt, Artificial Sequence
  targeting sequence with CTCN PAM
uccugugacuuagaaugccu

SEQ ID NO: 7340 - RNA, 20 nt, Artificial Sequence
  targeting sequence with CTCN PAM
uaucucauccugugacuuag

SEQ ID NO: 7341 - RNA, 20 nt, Artificial Sequence
  targeting sequence with CTCN PAM
ccaagacagaacaggauacc

SEQ ID NO: 7342 - RNA, 20 nt, Artificial Sequence
  targeting sequence with CTCN PAM
aagacagaacaggauaccug

SEQ ID NO: 7343 - RNA, 20 nt, Artificial Sequence
  targeting sequence with CTCN PAM
auucaccaggaccagccaac

SEQ ID NO: 7344 - RNA, 20 nt, Artificial Sequence
  targeting sequence with CTCN PAM
uguuaugguuuugcaaaggc

SEQ ID NO: 7345 - RNA, 20 nt, Artificial Sequence
  targeting sequence with CTCN PAM
aaagaagaaaaaccagacua

SEQ ID NO: 7346 - RNA, 20 nt, Artificial Sequence
  targeting sequence with CTCN PAM
ccaaagaagaaaaaccagac

SEQ ID NO: 7347 - RNA, 20 nt, Artificial Sequence
  targeting sequence with CTCN PAM
cuccaaagaagaaaaaccag

SEQ ID NO: 7348 - RNA, 20 nt, Artificial Sequence
  targeting sequence with CTCN PAM
cuuggugucucucuccaaag

SEQ ID NO: 7349 - RNA, 20 nt, Artificial Sequence
  targeting sequence with CTCN PAM
acucugcuaagccagagaau

SEQ ID NO: 7350 - RNA, 20 nt, Artificial Sequence
  targeting sequence with CTCN PAM
gcuaagccagagaauggcug

SEQ ID NO: 7351 - RNA, 20 nt, Artificial Sequence
  targeting sequence with CTCN PAM
cggccacaaugcuauacuuc

SEQ ID NO: 7352 - RNA, 20 nt, Artificial Sequence
  targeting sequence with CTCN PAM
gaagccacacuggguucaau

SEQ ID NO: 7353 - RNA, 20 nt, Artificial Sequence
  targeting sequence with CTCN PAM
acuucuuguuaaagcuaugu

SEQ ID NO: 7354 - RNA, 20 nt, Artificial Sequence
  targeting sequence with CTCN PAM
aaguagagaugcaauagaga

SEQ ID NO: 7355 - RNA, 20 nt, Artificial Sequence
  targeting sequence with CTCN PAM
acuuagagggcaaaguaaga

SEQ ID NO: 7356 - RNA, 20 nt, Artificial Sequence
  targeting sequence with CTCN PAM
auugcaucucuacuuagagg

SEQ ID NO: 7357 - RNA, 20 nt, Artificial Sequence
  targeting sequence with CTCN PAM
cuauugcaucucuacuuaga

SEQ ID NO: 7358 - RNA, 20 nt, Artificial Sequence
  targeting sequence with CTCN PAM
cucucuauugcaucucuacu

SEQ ID NO: 7359 - RNA, 20 nt, Artificial Sequence
  targeting sequence with CTCN PAM
gaagcacuuuacauauguaa

SEQ ID NO: 7360 - RNA, 20 nt, Artificial Sequence
  targeting sequence with CTCN PAM
ucaagaccugacuaagaugu

SEQ ID NO: 7361 - RNA, 20 nt, Artificial Sequence
  targeting sequence with CTCN PAM
uauucacucuucaagaccug

SEQ ID NO: 7362 - RNA, 20 nt, Artificial Sequence
  targeting sequence with CTCN PAM
ggauaaggaggagggaaagg

SEQ ID NO: 7363 - RNA, 20 nt, Artificial Sequence
  targeting sequence with CTCN PAM
uuauccagagaacucuuauu

SEQ ID NO: 7364 - RNA, 20 nt, Artificial Sequence
  targeting sequence with CTCN PAM
uccuuauccagagaacucuu

SEQ ID NO: 7365 - RNA, 20 nt, Artificial Sequence
  targeting sequence with CTCN PAM
ugcccagaaugccuuucccu

SEQ ID NO: 7366 - RNA, 20 nt, Artificial Sequence
  targeting sequence with CTCN PAM
uuccucaucucagugggaaa

SEQ ID NO: 7367 - RNA, 20 nt, Artificial Sequence
  targeting sequence with CTCN PAM
ucucagugggaaaacuuuca

SEQ ID NO: 7368 - RNA, 20 nt, Artificial Sequence
  targeting sequence with CTCN PAM
gugggaaaacuuucaauauu

SEQ ID NO: 7369 - RNA, 20 nt, Artificial Sequence
  targeting sequence with CTCN PAM
auaugggaaccccuuaguuu

SEQ ID NO: 7370 - RNA, 20 nt, Artificial Sequence
  targeting sequence with CTCN PAM
gacuuuuagcauccuuauaa

SEQ ID NO: 7371 - RNA, 20 nt, Artificial Sequence
  targeting sequence with CTCN PAM
guaccuggguguaaucuccg

SEQ ID NO: 7372 - RNA, 20 nt, Artificial Sequence
  targeting sequence with CTCN PAM
cgguaccuggguguaaucuc

SEQ ID NO: 7373 - RNA, 20 nt, Artificial Sequence
  targeting sequence with CTCN PAM
uaguaggcucuggagggaaa

SEQ ID NO: 7374 - RNA, 20 nt, Artificial Sequence
  targeting sequence with CTCN PAM
ggagggaaagcaugcaaagu

SEQ ID NO: 7375 - RNA, 20 nt, Artificial Sequence
  targeting sequence with CTCN PAM
agagccuacuaugagcuuuc

SEQ ID NO: 7376 - RNA, 20 nt, Artificial Sequence
  targeting sequence with CTCN PAM
gaccuuaggugggcacaggu

SEQ ID NO: 7377 - RNA, 20 nt, Artificial Sequence
  targeting sequence with CTCN PAM
cuucuuagaacagcagcaca

SEQ ID NO: 7378 - RNA, 20 nt, Artificial Sequence
  targeting sequence with CTCN PAM
ccuuuggugcuguuuggagc

SEQ ID NO: 7379 - RNA, 20 nt, Artificial Sequence
  targeting sequence with CTCN PAM
uuuggugcuguuuggagccc

SEQ ID NO: 7380 - RNA, 20 nt, Artificial Sequence
  targeting sequence with CTCN PAM
aaacagcaccaaaggagagu

SEQ ID NO: 7381 - RNA, 20 nt, Artificial Sequence
  targeting sequence with CTCN PAM
uuggagucuggggaaauucg

SEQ ID NO: 7382 - RNA, 20 nt, Artificial Sequence
  targeting sequence with CTCN PAM
aaagagugcuggggcuccaa

SEQ ID NO: 7383 - RNA, 20 nt, Artificial Sequence
  targeting sequence with CTCN PAM
uuguuuuuacuuuguuugca

SEQ ID NO: 7384 - RNA, 20 nt, Artificial Sequence
  targeting sequence with CTCN PAM
uggcuaagguuccaagcuau

SEQ ID NO: 7385 - RNA, 20 nt, Artificial Sequence
  targeting sequence with CTCN PAM
cagcaauacaaagacaugua

SEQ ID NO: 7386 - RNA, 20 nt, Artificial Sequence
  targeting sequence with CTCN PAM
cauuugucaaaagaaagcac

SEQ ID NO: 7387 - RNA, 20 nt, Artificial Sequence
  targeting sequence with CTCN PAM
aaaucuucccuucagccuag

SEQ ID NO: 7388 - RNA, 20 nt, Artificial Sequence
  targeting sequence with CTCN PAM
cacucuaaaucuucccuuca

SEQ ID NO: 7389 - RNA, 20 nt, Artificial Sequence
  targeting sequence with CTCN PAM
agcagcucccacucuaaauc

SEQ ID NO: 7390 - RNA, 20 nt, Artificial Sequence
  targeting sequence with CTCN PAM
cauucuauucaaagucucac

SEQ ID NO: 7391 - RNA, 20 nt, Artificial Sequence
  targeting sequence with CTCN PAM
cuaagauaaaugcauaucua

SEQ ID NO: 7392 - RNA, 20 nt, Artificial Sequence
  targeting sequence with CTCN PAM
uuuggaaaggcuaaucagaa

SEQ ID NO: 7393 - RNA, 20 nt, Artificial Sequence
  targeting sequence with CTCN PAM
aagcgggagaggggacuugg

SEQ ID NO: 7394 - RNA, 20 nt, Artificial Sequence
  targeting sequence with CTCN PAM
ugccucccuuguuaaaagug

SEQ ID NO: 7395 - RNA, 20 nt, Artificial Sequence
  targeting sequence with CTCN PAM
cuuguuaaaagugaaagaau

SEQ ID NO: 7396 - RNA, 20 nt, Artificial Sequence
  targeting sequence with CTCN PAM
auucuuucacuuuuaacaag

SEQ ID NO: 7397 - RNA, 20 nt, Artificial Sequence
  targeting sequence with CTCN PAM
cuaauaacccuuuugggcac

SEQ ID NO: 7398 - RNA, 20 nt, Artificial Sequence
  targeting sequence with CTCN PAM
ccuacuacuuaaugguuccu

SEQ ID NO: 7399 - RNA, 20 nt, Artificial Sequence
  targeting sequence with CTCN PAM
aauucuuuaucagguuuuaa

SEQ ID NO: 7400 - RNA, 20 nt, Artificial Sequence
  targeting sequence with CTCN PAM
uagucuugauuaaaauaaaa

SEQ ID NO: 7401 - RNA, 20 nt, Artificial Sequence
  targeting sequence with CTCN PAM
gcuagauuuuguuuauguau

SEQ ID NO: 7402 - RNA, 20 nt, Artificial Sequence
  targeting sequence with CTCN PAM
acuaaaaauacaaaaauuag

SEQ ID NO: 7403 - RNA, 20 nt, Artificial Sequence
  targeting sequence with CTCN PAM
ugccaccaugcccagcuaau

SEQ ID NO: 7404 - RNA, 20 nt, Artificial Sequence
  targeting sequence with CTCN PAM
caaguagcugggauuacagg

SEQ ID NO: 7405 - RNA, 20 nt, Artificial Sequence
  targeting sequence with CTCN PAM
gccucccaaguagcugggau

SEQ ID NO: 7406 - RNA, 20 nt, Artificial Sequence
  targeting sequence with CTCN PAM
gccucagccucccaaguagc

SEQ ID NO: 7407 - RNA, 20 nt, Artificial Sequence
  targeting sequence with CTCN PAM
auuaauuccugcggaccuga

SEQ ID NO: 7408 - RNA, 20 nt, Artificial Sequence
  targeting sequence with CTCN PAM
acacacuuaacguaucaaga

SEQ ID NO: 7409 - RNA, 20 nt, Artificial Sequence
  targeting sequence with CTCN PAM
cacaaauagaauuuaagaca

SEQ ID NO: 7410 - RNA, 20 nt, Artificial Sequence
  targeting sequence with CTCN PAM
caaauagaauuuaagacaua

SEQ ID NO: 7411 - RNA, 20 nt, Artificial Sequence
  targeting sequence with CTCN PAM
agggcuacucagggagagag

SEQ ID NO: 7412 - RNA, 20 nt, Artificial Sequence
  targeting sequence with CTCN PAM
gggagagagagcccagaaac

SEQ ID NO: 7413 - RNA, 20 nt, Artificial Sequence
  targeting sequence with CTCN PAM
cugaguagcccuggagaccc

SEQ ID NO: 7414 - RNA, 20 nt, Artificial Sequence
  targeting sequence with CTCN PAM
cccugaguagcccuggagac

SEQ ID NO: 7415 - RNA, 20 nt, Artificial Sequence
  targeting sequence with CTCN PAM
cucccugaguagcccuggag

SEQ ID NO: 7416 - RNA, 20 nt, Artificial Sequence
  targeting sequence with CTCN PAM
cucucccugaguagcccugg

SEQ ID NO: 7417 - RNA, 20 nt, Artificial Sequence
  targeting sequence with CTCN PAM
ggucucuuucucucugugca

SEQ ID NO: 7418 - RNA, 20 nt, Artificial Sequence
  targeting sequence with CTCN PAM
uucucucugugcaaacuggu

SEQ ID NO: 7419 - RNA, 20 nt, Artificial Sequence
  targeting sequence with CTCN PAM
cugugcaaacugguuaaaug

SEQ ID NO: 7420 - RNA, 20 nt, Artificial Sequence
  targeting sequence with CTCN PAM
gugcaaacugguuaaaugaa

SEQ ID NO: 7421 - RNA, 20 nt, Artificial Sequence
  targeting sequence with CTCN PAM
uauuauuauuaaaccaauua

SEQ ID NO: 7422 - RNA, 20 nt, Artificial Sequence
  targeting sequence with CTCN PAM
cgucacaugaauuaaauaaa

SEQ ID NO: 7423 - RNA, 20 nt, Artificial Sequence
  targeting sequence with CTCN PAM
ugcaugggaaagcuuuuauc

SEQ ID NO: 7424 - RNA, 20 nt, Artificial Sequence
  targeting sequence with CTCN PAM
uaaaaccaaauagaucaaag

SEQ ID NO: 7425 - RNA, 20 nt, Artificial Sequence
  targeting sequence with CTCN PAM
gaauucuugguauuauccuc

SEQ ID NO: 7426 - RNA, 20 nt, Artificial Sequence
  targeting sequence with CTCN PAM
caauaguaauaauaauaguc

SEQ ID NO: 7427 - RNA, 20 nt, Artificial Sequence
  targeting sequence with CTCN PAM
cuggugugcuguauucucuc

SEQ ID NO: 7428 - RNA, 20 nt, Artificial Sequence
  targeting sequence with CTCN PAM
caaagguuuuaaaugcuugc

SEQ ID NO: 7429 - RNA, 20 nt, Artificial Sequence
  targeting sequence with CTCN PAM
aagguuuuaaaugcuugcau

SEQ ID NO: 7430 - RNA, 20 nt, Artificial Sequence
  targeting sequence with CTCN PAM
auuuuuguuugguuuggucu

SEQ ID NO: 7431 - RNA, 20 nt, Artificial Sequence
  targeting sequence with CTCN PAM
ugcaaaucucuauagcaaac

SEQ ID NO: 7432 - RNA, 20 nt, Artificial Sequence
  targeting sequence with CTCN PAM
auagcaaacauucuugacaa

SEQ ID NO: 7433 - RNA, 20 nt, Artificial Sequence
  targeting sequence with CTCN PAM
guugucaagaauguuugcua

SEQ ID NO: 7434 - RNA, 20 nt, Artificial Sequence
  targeting sequence with CTCN PAM
ccuagagaccaccaaguuuu

SEQ ID NO: 7435 - RNA, 20 nt, Artificial Sequence
  targeting sequence with CTCN PAM
uagagaccaccaaguuuuag

SEQ ID NO: 7436 - RNA, 20 nt, Artificial Sequence
  targeting sequence with CTCN PAM
aggagagaagaaaugaauuu

SEQ ID NO: 7437 - RNA, 20 nt, Artificial Sequence
  targeting sequence with CTCN PAM
gccucccaugaagauuuaug

SEQ ID NO: 7438 - RNA, 20 nt, Artificial Sequence
  targeting sequence with CTCN PAM
caugaagauuuauggggauc

SEQ ID NO: 7439 - RNA, 20 nt, Artificial Sequence
  targeting sequence with CTCN PAM
uacagaggaaaugaggcagg

SEQ ID NO: 7440 - RNA, 20 nt, Artificial Sequence
  targeting sequence with CTCN PAM
guaagagaugugauccccau

SEQ ID NO: 7441 - RNA, 20 nt, Artificial Sequence
  targeting sequence with CTCN PAM
uuuccucuguaagagaugug

SEQ ID NO: 7442 - RNA, 20 nt, Artificial Sequence
  targeting sequence with CTCN PAM
agacccuauuuuccugccuc

SEQ ID NO: 7443 - RNA, 20 nt, Artificial Sequence
  targeting sequence with CTCN PAM
acaaugugggaccggggccc

SEQ ID NO: 7444 - RNA, 20 nt, Artificial Sequence
  targeting sequence with CTCN PAM
accgguaacaauagugcuga

SEQ ID NO: 7445 - RNA, 20 nt, Artificial Sequence
  targeting sequence with CTCN PAM
gagggcugaagacacagaca

SEQ ID NO: 7446 - RNA, 20 nt, Artificial Sequence
  targeting sequence with CTCN PAM
gaggcugugcaccaucuaaa

SEQ ID NO: 7447 - RNA, 20 nt, Artificial Sequence
  targeting sequence with CTCN PAM
gccuagugucugugucuuca

SEQ ID NO: 7448 - RNA, 20 nt, Artificial Sequence
  targeting sequence with CTCN PAM
caacaccagcagagagcugg

SEQ ID NO: 7449 - RNA, 20 nt, Artificial Sequence
  targeting sequence with CTCN PAM
acaccagcagagagcuggcc

SEQ ID NO: 7450 - RNA, 20 nt, Artificial Sequence
  targeting sequence with CTCN PAM
gcugguguugagagcuguuu

SEQ ID NO: 7451 - RNA, 20 nt, Artificial Sequence
  targeting sequence with CTCN PAM
cugcugguguugagagcugu

SEQ ID NO: 7452 - RNA, 20 nt, Artificial Sequence
  targeting sequence with CTCN PAM
aaugucuggagcuguagcag

SEQ ID NO: 7453 - RNA, 20 nt, Artificial Sequence
  targeting sequence with CTCN PAM
agacauucgaggcagaacga

SEQ ID NO: 7454 - RNA, 20 nt, Artificial Sequence
  targeting sequence with CTCN PAM
cgcugacacgauggcugcua

SEQ ID NO: 7455 - RNA, 20 nt, Artificial Sequence
  targeting sequence with CTCN PAM
ugaagcugaaauuuccauaa

SEQ ID NO: 7456 - RNA, 20 nt, Artificial Sequence
  targeting sequence with CTCN PAM
ggggcagaggggagcuuucu

SEQ ID NO: 7457 - RNA, 20 nt, Artificial Sequence
  targeting sequence with CTCN PAM
gccccagagaaaggcagcgu

SEQ ID NO: 7458 - RNA, 20 nt, Artificial Sequence
  targeting sequence with CTCN PAM
ccucugccccagagaaaggc

SEQ ID NO: 7459 - RNA, 20 nt, Artificial Sequence
  targeting sequence with CTCN PAM
uagaaagcuccccucugccc

SEQ ID NO: 7460 - RNA, 20 nt, Artificial Sequence
  targeting sequence with CTCN PAM
ucuuagacuccuagaaagcu

SEQ ID NO: 7461 - RNA, 20 nt, Artificial Sequence
  targeting sequence with CTCN PAM
caccaccagccccucuucuu

SEQ ID NO: 7462 - RNA, 20 nt, Artificial Sequence
  targeting sequence with CTCN PAM
ugcucacaccaccagccccu

SEQ ID NO: 7463 - RNA, 20 nt, Artificial Sequence
  targeting sequence with CTCN PAM
aucuucagagcccaaucagg

SEQ ID NO: 7464 - RNA, 20 nt, Artificial Sequence
  targeting sequence with CTCN PAM
gaagauggagggucacaggu

SEQ ID NO: 7465 - RNA, 20 nt, Artificial Sequence
  targeting sequence with CTCN PAM
acugacccccugauugggcu

SEQ ID NO: 7466 - RNA, 20 nt, Artificial Sequence
  targeting sequence with CTCN PAM
gagagcacggcugagaauua

SEQ ID NO: 7467 - RNA, 20 nt, Artificial Sequence
  targeting sequence with CTCN PAM
gagaucccccauucuccacu

SEQ ID NO: 7468 - RNA, 20 nt, Artificial Sequence
  targeting sequence with CTCN PAM
cagagaucccccauucucca

SEQ ID NO: 7469 - RNA, 20 nt, Artificial Sequence
  targeting sequence with CTCN PAM
gccgugcucucagagauccc

SEQ ID NO: 7470 - RNA, 20 nt, Artificial Sequence
  targeting sequence with CTCN PAM
aauucucagccgugcucuca

SEQ ID NO: 7471 - RNA, 20 nt, Artificial Sequence
  targeting sequence with CTCN PAM
ucaggaaagggauggcuugg

SEQ ID NO: 7472 - RNA, 20 nt, Artificial Sequence
  targeting sequence with CTCN PAM
ggaaagggauggcuuggcag

SEQ ID NO: 7473 - RNA, 20 nt, Artificial Sequence
  targeting sequence with CTCN PAM
uccuucccacugcugccaag

SEQ ID NO: 7474 - RNA, 20 nt, Artificial Sequence
  targeting sequence with CTCN PAM
ccugaaguuuuguguuuuua

SEQ ID NO: 7475 - RNA, 20 nt, Artificial Sequence
  targeting sequence with CTCN PAM
auaccaucagaauucucacc

SEQ ID NO: 7476 - RNA, 20 nt, Artificial Sequence
  targeting sequence with CTCN PAM
gccuccugaguagcugggau

SEQ ID NO: 7477 - RNA, 20 nt, Artificial Sequence
  targeting sequence with CTCN PAM
ugaguagcugggauuauagg

SEQ ID NO: 7478 - RNA, 20 nt, Artificial Sequence
  targeting sequence with CTCN PAM
ggaggcugaggcaaaagaau

SEQ ID NO: 7479 - RNA, 20 nt, Artificial Sequence
  targeting sequence with CTCN PAM
ugcuggccaaguuuucucca

SEQ ID NO: 7480 - RNA, 20 nt, Artificial Sequence
  targeting sequence with CTCN PAM
agcucugggaagccacagug

SEQ ID NO: 7481 - RNA, 20 nt, Artificial Sequence
  targeting sequence with CTCN PAM
gggaagccacagugguuaag

SEQ ID NO: 7482 - RNA, 20 nt, Artificial Sequence
  targeting sequence with CTCN PAM
aaauguuccaaagaacaauc

SEQ ID NO: 7483 - RNA, 20 nt, Artificial Sequence
  targeting sequence with CTCN PAM
aucacuguagaagcuuccag

SEQ ID NO: 7484 - RNA, 20 nt, Artificial Sequence
  targeting sequence with CTCN PAM
caaucacuguagaagcuucc

SEQ ID NO: 7485 - RNA, 20 nt, Artificial Sequence
  targeting sequence with CTCN PAM
ucucaaucacuguagaagcu

SEQ ID NO: 7486 - RNA, 20 nt, Artificial Sequence
  targeting sequence with CTCN PAM
gcaggcuaauggcagaguca

SEQ ID NO: 7487 - RNA, 20 nt, Artificial Sequence
  targeting sequence with CTCN PAM
gccauuagccugcagaguga

SEQ ID NO: 7488 - RNA, 20 nt, Artificial Sequence
  targeting sequence with CTCN PAM
ugacucugccauuagccugc

SEQ ID NO: 7489 - RNA, 20 nt, Artificial Sequence
  targeting sequence with CTCN PAM
guuucccgaucuguaaaaag

SEQ ID NO: 7490 - RNA, 20 nt, Artificial Sequence
  targeting sequence with CTCN PAM
cagucucaguuucccgaucu

SEQ ID NO: 7491 - RNA, 20 nt, Artificial Sequence
  targeting sequence with CTCN PAM
cacccucccagucucaguuu

SEQ ID NO: 7492 - RNA, 20 nt, Artificial Sequence
  targeting sequence with CTCN PAM
gggauucaggcagacccaug

SEQ ID NO: 7493 - RNA, 20 nt, Artificial Sequence
  targeting sequence with CTCN PAM
uggaguccaggcugucacca

SEQ ID NO: 7494 - RNA, 20 nt, Artificial Sequence
  targeting sequence with CTCN PAM
aagagugaccucagggauuc

SEQ ID NO: 7495 - RNA, 20 nt, Artificial Sequence
  targeting sequence with CTCN PAM
ccauccacagacccucccag

SEQ ID NO: 7496 - RNA, 20 nt, Artificial Sequence
  targeting sequence with CTCN PAM
auccacagacccucccagcu

SEQ ID NO: 7497 - RNA, 20 nt, Artificial Sequence
  targeting sequence with CTCN PAM
cagcucuuagcucuuugucu

SEQ ID NO: 7498 - RNA, 20 nt, Artificial Sequence
  targeting sequence with CTCN PAM
uagcucuuugucuugguucc

SEQ ID NO: 7499 - RNA, 20 nt, Artificial Sequence
  targeting sequence with CTCN PAM
cagaacagcagccgcagaau

SEQ ID NO: 7500 - RNA, 20 nt, Artificial Sequence
  targeting sequence with CTCN PAM
aggcuuugccuuccuuggaa

SEQ ID NO: 7501 - RNA, 20 nt, Artificial Sequence
  targeting sequence with CTCN PAM
aaaaaaggaaaugacagucu

SEQ ID NO: 7502 - RNA, 20 nt, Artificial Sequence
  targeting sequence with CTCN PAM
gaggacgcagcuacuucucu

SEQ ID NO: 7503 - RNA, 20 nt, Artificial Sequence
  targeting sequence with CTCN PAM
gaguuuaugcucuaaaaaag

SEQ ID NO: 7504 - RNA, 20 nt, Artificial Sequence
  targeting sequence with CTCN PAM
ccaugaauaggcugucuccc

SEQ ID NO: 7505 - RNA, 20 nt, Artificial Sequence
  targeting sequence with CTCN PAM
augaauaggcugucucccag

SEQ ID NO: 7506 - RNA, 20 nt, Artificial Sequence
  targeting sequence with CTCN PAM
caggcacagaauuccaggaa

SEQ ID NO: 7507 - RNA, 20 nt, Artificial Sequence
  targeting sequence with CTCN PAM
ucccuugaaaccaaccuuga

SEQ ID NO: 7508 - RNA, 20 nt, Artificial Sequence
  targeting sequence with CTCN PAM
agccacccugcaagggacac

SEQ ID NO: 7509 - RNA, 20 nt, Artificial Sequence
  targeting sequence with CTCN PAM
aagagccugaaaaaucaucu

SEQ ID NO: 7510 - RNA, 20 nt, Artificial Sequence
  targeting sequence with CTCN PAM
uggagcuggcuccagccacc

SEQ ID NO: 7511 - RNA, 20 nt, Artificial Sequence
  targeting sequence with CTCN PAM
ggacccaacaggaaucuugg

SEQ ID NO: 7512 - RNA, 20 nt, Artificial Sequence
  targeting sequence with CTCN PAM
guucugugaucuugguuauu

SEQ ID NO: 7513 - RNA, 20 nt, Artificial Sequence
  targeting sequence with CTCN PAM
gagccucaguuuccucaauc

SEQ ID NO: 7514 - RNA, 20 nt, Artificial Sequence
  targeting sequence with CTCN PAM
gagaaauucaaauaaccaag

SEQ ID NO: 7515 - RNA, 20 nt, Artificial Sequence
  targeting sequence with CTCN PAM
guuuccucaauccuuaggug

SEQ ID NO: 7516 - RNA, 20 nt, Artificial Sequence
  targeting sequence with CTCN PAM
auccuuagguggaaauaaaa

SEQ ID NO: 7517 - RNA, 20 nt, Artificial Sequence
  targeting sequence with CTCN PAM
uaccuuaaggucugcugauu

SEQ ID NO: 7518 - RNA, 20 nt, Artificial Sequence
  targeting sequence with CTCN PAM
caugauuagguuagacccac

SEQ ID NO: 7519 - RNA, 20 nt, Artificial Sequence
  targeting sequence with CTCN PAM
ugugcugugcaaucuuggcc

SEQ ID NO: 7520 - RNA, 20 nt, Artificial Sequence
  targeting sequence with CTCN PAM
gccugucacucaugugcugu

SEQ ID NO: 7521 - RNA, 20 nt, Artificial Sequence
  targeting sequence with CTCN PAM
uucuuuacauacuacuuuug

SEQ ID NO: 7522 - RNA, 20 nt, Artificial Sequence
  targeting sequence with CTCN PAM
aaaaaguuuuauuggaacac

SEQ ID NO: 7523 - RNA, 20 nt, Artificial Sequence
  targeting sequence with CTCN PAM
cuuuccuuuucugggccuau

SEQ ID NO: 7524 - RNA, 20 nt, Artificial Sequence
  targeting sequence with CTCN PAM
aacagcuucuaguagcaacc

SEQ ID NO: 7525 - RNA, 20 nt, Artificial Sequence
  targeting sequence with CTCN PAM
agcggguagggaagggagcu

SEQ ID NO: 7526 - RNA, 20 nt, Artificial Sequence
  targeting sequence with CTCN PAM
gaagaaaacuggccaucagc

SEQ ID NO: 7527 - RNA, 20 nt, Artificial Sequence
  targeting sequence with CTCN PAM
gcugggcgacucagaagaaa

SEQ ID NO: 7528 - RNA, 20 nt, Artificial Sequence
  targeting sequence with CTCN PAM
gaauuucccuggcucggcug

SEQ ID NO: 7529 - RNA, 20 nt, Artificial Sequence
  targeting sequence with CTCN PAM
ggacccagccggaugcagua

SEQ ID NO: 7530 - RNA, 20 nt, Artificial Sequence
  targeting sequence with CTCN PAM
ggagguccccauaaacuagg

SEQ ID NO: 7531 - RNA, 20 nt, Artificial Sequence
  targeting sequence with CTCN PAM
ugagugcagggaccaggugu

SEQ ID NO: 7532 - RNA, 20 nt, Artificial Sequence
  targeting sequence with CTCN PAM
ccuaguuuauggggaccucc

SEQ ID NO: 7533 - RNA, 20 nt, Artificial Sequence
  targeting sequence with CTCN PAM
auuugugaaucuccccuagu

SEQ ID NO: 7534 - RNA, 20 nt, Artificial Sequence
  targeting sequence with CTCN PAM
ggcccuggaacuggacaagu

SEQ ID NO: 7535 - RNA, 20 nt, Artificial Sequence
  targeting sequence with CTCN PAM
ggcccugcuucaaccugaau

SEQ ID NO: 7536 - RNA, 20 nt, Artificial Sequence
  targeting sequence with CTCN PAM
cgauggcccugccccaggug

SEQ ID NO: 7537 - RNA, 20 nt, Artificial Sequence
  targeting sequence with CTCN PAM
cuccuuuacgggcacucagc

SEQ ID NO: 7538 - RNA, 20 nt, Artificial Sequence
  targeting sequence with CTCN PAM
uuuacgggcacucagccccu

SEQ ID NO: 7539 - RNA, 20 nt, Artificial Sequence
  targeting sequence with CTCN PAM
gccccuucugucgucgaccu

SEQ ID NO: 7540 - RNA, 20 nt, Artificial Sequence
  targeting sequence with CTCN PAM
gcuuccuaagcagcuaggau

SEQ ID NO: 7541 - RNA, 20 nt, Artificial Sequence
  targeting sequence with CTCN PAM
ugccucagcuuccuaagcag

SEQ ID NO: 7542 - RNA, 20 nt, Artificial Sequence
  targeting sequence with CTCN PAM
ggaggcagagggugcaauga

SEQ ID NO: 7543 - RNA, 20 nt, Artificial Sequence
  targeting sequence with CTCN PAM
ugaguucaagugauucuccu

SEQ ID NO: 7544 - RNA, 20 nt, Artificial Sequence
  targeting sequence with CTCN PAM
gccuccugaguucaagugau

SEQ ID NO: 7545 - RNA, 20 nt, Artificial Sequence
  targeting sequence with CTCN PAM
uugcacccucugccuccuga

SEQ ID NO: 7546 - RNA, 20 nt, Artificial Sequence
  targeting sequence with CTCN PAM
gcucauugcacccucugccu

SEQ ID NO: 7547 - RNA, 20 nt, Artificial Sequence
  targeting sequence with CTCN PAM
accccaaccgucccccagga

SEQ ID NO: 7548 - RNA, 20 nt, Artificial Sequence
  targeting sequence with CTCN PAM
uuccauguggaucccccaca

SEQ ID NO: 7549 - RNA, 20 nt, Artificial Sequence
  targeting sequence with CTCN PAM
cuccuuccauguggaucccc

SEQ ID NO: 7550 - RNA, 20 nt, Artificial Sequence
  targeting sequence with CTCN PAM
cauggggucggggucauuuu

SEQ ID NO: 7551 - RNA, 20 nt, Artificial Sequence
  targeting sequence with CTCN PAM
gacuagccccugcaacugcc

SEQ ID NO: 7552 - RNA, 20 nt, Artificial Sequence
  targeting sequence with CTCN PAM
cgggccucagacuagccccu

SEQ ID NO: 7553 - RNA, 20 nt, Artificial Sequence
  targeting sequence with CTCN PAM
ucccgggccucagacuagcc

SEQ ID NO: 7554 - RNA, 20 nt, Artificial Sequence
  targeting sequence with CTCN PAM
uucccagcuuaacuccuccc

SEQ ID NO: 7555 - RNA, 20 nt, Artificial Sequence
  targeting sequence with CTCN PAM
ucuugacagccucuccuagc

SEQ ID NO: 7556 - RNA, 20 nt, Artificial Sequence
  targeting sequence with CTCN PAM
ugacagccucuccuagcucu

SEQ ID NO: 7557 - RNA, 20 nt, Artificial Sequence
  targeting sequence with CTCN PAM
ccuagcucuuugacuuuggg

SEQ ID NO: 7558 - RNA, 20 nt, Artificial Sequence
  targeting sequence with CTCN PAM
uagcucuuugacuuugggga

SEQ ID NO: 7559 - RNA, 20 nt, Artificial Sequence
  targeting sequence with CTCN PAM
uugacuuuggggauggggga

SEQ ID NO: 7560 - RNA, 20 nt, Artificial Sequence
  targeting sequence with CTCN PAM
cuacaugaaaaggcuuugag

SEQ ID NO: 7561 - RNA, 20 nt, Artificial Sequence
  targeting sequence with CTCN PAM
aagccuuuucauguagggag

SEQ ID NO: 7562 - RNA, 20 nt, Artificial Sequence
  targeting sequence with CTCN PAM
agcucaaagccuuuucaugu

SEQ ID NO: 7563 - RNA, 20 nt, Artificial Sequence
  targeting sequence with CTCN PAM
ugucuccagcucaaagccuu

SEQ ID NO: 7564 - RNA, 20 nt, Artificial Sequence
  targeting sequence with CTCN PAM
uccugugaaucuguccaggg

SEQ ID NO: 7565 - RNA, 20 nt, Artificial Sequence
  targeting sequence with CTCN PAM
gaccuagguuuccgccuccu

SEQ ID NO: 7566 - RNA, 20 nt, Artificial Sequence
  targeting sequence with CTCN PAM
uacaucugugugauccgggg

SEQ ID NO: 7567 - RNA, 20 nt, Artificial Sequence
  targeting sequence with CTCN PAM
guguccagaugugugacggg

SEQ ID NO: 7568 - RNA, 20 nt, Artificial Sequence
  targeting sequence with CTCN PAM
cgucacacaucuggacacag

SEQ ID NO: 7569 - RNA, 20 nt, Artificial Sequence
  targeting sequence with CTCN PAM
acccuccgcuauugcaugac

SEQ ID NO: 7570 - RNA, 20 nt, Artificial Sequence
  targeting sequence with CTCN PAM
gcuauugcaugacagucagc

SEQ ID NO: 7571 - RNA, 20 nt, Artificial Sequence
  targeting sequence with CTCN PAM
gcuucgcuugguggagcgaa

SEQ ID NO: 7572 - RNA, 20 nt, Artificial Sequence
  targeting sequence with CTCN PAM
accaagcgaagcagagcguc

SEQ ID NO: 7573 - RNA, 20 nt, Artificial Sequence
  targeting sequence with CTCN PAM
guggguggggccagcuggcc

SEQ ID NO: 7574 - RNA, 20 nt, Artificial Sequence
  targeting sequence with CTCN PAM
ggcaccggauacuccguggg

SEQ ID NO: 7575 - RNA, 20 nt, Artificial Sequence
  targeting sequence with CTCN PAM
gguccgucagcuucgucugc

SEQ ID NO: 7576 - RNA, 20 nt, Artificial Sequence
  targeting sequence with CTCN PAM
uuggccugcugugguccguc

SEQ ID NO: 7577 - RNA, 20 nt, Artificial Sequence
  targeting sequence with CTCN PAM
augggaccccuaucaccucu

SEQ ID NO: 7578 - RNA, 20 nt, Artificial Sequence
  targeting sequence with CTCN PAM
ccagagaccuguacuaccuc

SEQ ID NO: 7579 - RNA, 20 nt, Artificial Sequence
  targeting sequence with CTCN PAM
agagaccuguacuaccucac

SEQ ID NO: 7580 - RNA, 20 nt, Artificial Sequence
  targeting sequence with CTCN PAM
ggagaggugauagggguccc

SEQ ID NO: 7581 - RNA, 20 nt, Artificial Sequence
  targeting sequence with CTCN PAM
cuguggaguccucagagaag

SEQ ID NO: 7582 - RNA, 20 nt, Artificial Sequence
  targeting sequence with CTCN PAM
acagugagguaguacagguc

SEQ ID NO: 7583 - RNA, 20 nt, Artificial Sequence
  targeting sequence with CTCN PAM
gagaaggagagcugcagguc

SEQ ID NO: 7584 - RNA, 20 nt, Artificial Sequence
  targeting sequence with CTCN PAM
gaggacuccacagugaggua

SEQ ID NO: 7585 - RNA, 20 nt, Artificial Sequence
  targeting sequence with CTCN PAM
uucucugaggacuccacagu

SEQ ID NO: 7586 - RNA, 20 nt, Artificial Sequence
  targeting sequence with CTCN PAM
ccuucucugaggacuccaca

SEQ ID NO: 7587 - RNA, 20 nt, Artificial Sequence
  targeting sequence with CTCN PAM
cacagcacuaccuacuccgg

SEQ ID NO: 7588 - RNA, 20 nt, Artificial Sequence
  targeting sequence with CTCN PAM
cacacagcacuaccuacucc

SEQ ID NO: 7589 - RNA, 20 nt, Artificial Sequence
  targeting sequence with CTCN PAM
cucacacagcacuaccuacu

SEQ ID NO: 7590 - RNA, 20 nt, Artificial Sequence
  targeting sequence with CTCN PAM
augucuuuaaaagccaugcc

SEQ ID NO: 7591 - RNA, 20 nt, Artificial Sequence
  targeting sequence with CTCN PAM
aggaagccuuccuggguuuc

SEQ ID NO: 7592 - RNA, 20 nt, Artificial Sequence
  targeting sequence with CTCN PAM
uccaggaagccuuccugggu

SEQ ID NO: 7593 - RNA, 20 nt, Artificial Sequence
  targeting sequence with CTCN PAM
gcugccaccuccuccaggaa

SEQ ID NO: 7594 - RNA, 20 nt, Artificial Sequence
  targeting sequence with CTCN PAM
gcuugguaugggacagaaua

SEQ ID NO: 7595 - RNA, 20 nt, Artificial Sequence
  targeting sequence with CTCN PAM
uuugaaaugaaaaggacuaa

SEQ ID NO: 7596 - RNA, 20 nt, Artificial Sequence
  targeting sequence with CTCN PAM
cacccagccaggcgugagug

SEQ ID NO: 7597 - RNA, 20 nt, Artificial Sequence
  targeting sequence with CTCN PAM
cgccuggcugggugggagga

SEQ ID NO: 7598 - RNA, 20 nt, Artificial Sequence
  targeting sequence with CTCN PAM
gcuauuccugcucccaggca

SEQ ID NO: 7599 - RNA, 20 nt, Artificial Sequence
  targeting sequence with CTCN PAM
caggcaccucagucucuggu

SEQ ID NO: 7600 - RNA, 20 nt, Artificial Sequence
  targeting sequence with CTCN PAM
gucucugguggugcccgcug

SEQ ID NO: 7601 - RNA, 20 nt, Artificial Sequence
  targeting sequence with CTCN PAM
gguggugcccgcugugggua

SEQ ID NO: 7602 - RNA, 20 nt, Artificial Sequence
  targeting sequence with CTCN PAM
aggucagaaauaaagccuuc

SEQ ID NO: 7603 - RNA, 20 nt, Artificial Sequence
  targeting sequence with CTCN PAM
gaauagcacccagcauaccu

SEQ ID NO: 7604 - RNA, 20 nt, Artificial Sequence
  targeting sequence with CTCN PAM
ggaagcuccuaucuugagug

SEQ ID NO: 7605 - RNA, 20 nt, Artificial Sequence
  targeting sequence with CTCN PAM
uaucuugaguguaagucccc

SEQ ID NO: 7606 - RNA, 20 nt, Artificial Sequence
  targeting sequence with CTCN PAM
caccaccuucugucaccuua

SEQ ID NO: 7607 - RNA, 20 nt, Artificial Sequence
  targeting sequence with CTCN PAM
aagcaaacuuccugcugugg

SEQ ID NO: 7608 - RNA, 20 nt, Artificial Sequence
  targeting sequence with CTCN PAM
ccggcaccugugcccugccc

SEQ ID NO: 7609 - RNA, 20 nt, Artificial Sequence
  targeting sequence with CTCN PAM
uuuuacggaugaggagaaag

SEQ ID NO: 7610 - RNA, 20 nt, Artificial Sequence
  targeting sequence with CTCN PAM
uccguaaaaugaggauaaua

SEQ ID NO: 7611 - RNA, 20 nt, Artificial Sequence
  targeting sequence with CTCN PAM
ucauccguaaaaugaggaua

SEQ ID NO: 7612 - RNA, 20 nt, Artificial Sequence
  targeting sequence with CTCN PAM
uucuccucauccguaaaaug

SEQ ID NO: 7613 - RNA, 20 nt, Artificial Sequence
  targeting sequence with CTCN PAM
gaaccucuuucuccucaucc

SEQ ID NO: 7614 - RNA, 20 nt, Artificial Sequence
  targeting sequence with CTCN PAM
uggaaggaggcaaguugggu

SEQ ID NO: 7615 - RNA, 20 nt, Artificial Sequence
  targeting sequence with CTCN PAM
guccugcccucaucugcaag

SEQ ID NO: 7616 - RNA, 20 nt, Artificial Sequence
  targeting sequence with CTCN PAM
ucugcaaggaugcugggagc

SEQ ID NO: 7617 - RNA, 20 nt, Artificial Sequence
  targeting sequence with CTCN PAM
cagcauccuugcagaugagg

SEQ ID NO: 7618 - RNA, 20 nt, Artificial Sequence
  targeting sequence with CTCN PAM
gaggagggugaggacaggca

SEQ ID NO: 7619 - RNA, 20 nt, Artificial Sequence
  targeting sequence with CTCN PAM
gagcucccagcauccuugca

SEQ ID NO: 7620 - RNA, 20 nt, Artificial Sequence
  targeting sequence with CTCN PAM
ucugagcucccagcauccuu

SEQ ID NO: 7621 - RNA, 20 nt, Artificial Sequence
  targeting sequence with CTCN PAM
cccuccucugagcucccagc

SEQ ID NO: 7622 - RNA, 20 nt, Artificial Sequence
  targeting sequence with CTCN PAM
gcuuccucggcugucuucca

SEQ ID NO: 7623 - RNA, 20 nt, Artificial Sequence
  targeting sequence with CTCN PAM
gucacccuggucugugauug

SEQ ID NO: 7624 - RNA, 20 nt, Artificial Sequence
  targeting sequence with CTCN PAM
caaucacagaccagggugac

SEQ ID NO: 7625 - RNA, 20 nt, Artificial Sequence
  targeting sequence with CTCN PAM
cugcucccaaucacagacca

SEQ ID NO: 7626 - RNA, 20 nt, Artificial Sequence
  targeting sequence with CTCN PAM
cagcaggcugcugugaggcu

SEQ ID NO: 7627 - RNA, 20 nt, Artificial Sequence
  targeting sequence with CTCN PAM
ccaucccuggagguaugcaa

SEQ ID NO: 7628 - RNA, 20 nt, Artificial Sequence
  targeting sequence with CTCN PAM
aucccuggagguaugcaagu

SEQ ID NO: 7629 - RNA, 20 nt, Artificial Sequence
  targeting sequence with CTCN PAM
agggauggagagcuuacaac

SEQ ID NO: 7630 - RNA, 20 nt, Artificial Sequence
  targeting sequence with CTCN PAM
acuugcauaccuccagggau

SEQ ID NO: 7631 - RNA, 20 nt, Artificial Sequence
  targeting sequence with CTCN PAM
uaaguggggaugucaaccac

SEQ ID NO: 7632 - RNA, 20 nt, Artificial Sequence
  targeting sequence with CTCN PAM
cggcuuccucguaagugggg

SEQ ID NO: 7633 - RNA, 20 nt, Artificial Sequence
  targeting sequence with CTCN PAM
gccacugggaagcucacggc

SEQ ID NO: 7634 - RNA, 20 nt, Artificial Sequence
  targeting sequence with CTCN PAM
guaggguaugcagguggugu

SEQ ID NO: 7635 - RNA, 20 nt, Artificial Sequence
  targeting sequence with CTCN PAM
agggcuuccuccguagggua

SEQ ID NO: 7636 - RNA, 20 nt, Artificial Sequence
  targeting sequence with CTCN PAM
auccacuuggcuccagggcu

SEQ ID NO: 7637 - RNA, 20 nt, Artificial Sequence
  targeting sequence with CTCN PAM
gcacccagcccgccuggccu

SEQ ID NO: 7638 - RNA, 20 nt, Artificial Sequence
  targeting sequence with CTCN PAM
acccagcuaugagagcauca

SEQ ID NO: 7639 - RNA, 20 nt, Artificial Sequence
  targeting sequence with CTCN PAM
uagcuggguggaggccaggc

SEQ ID NO: 7640 - RNA, 20 nt, Artificial Sequence
  targeting sequence with CTCN PAM
cauagcuggguggaggccag

SEQ ID NO: 7641 - RNA, 20 nt, Artificial Sequence
  targeting sequence with CTCN PAM
ugaugccguuucugcggaga

SEQ ID NO: 7642 - RNA, 20 nt, Artificial Sequence
  targeting sequence with CTCN PAM
gcagaaacggcaucaagagc

SEQ ID NO: 7643 - RNA, 20 nt, Artificial Sequence
  targeting sequence with CTCN PAM
cugugucacccaggcuggag

SEQ ID NO: 7644 - RNA, 20 nt, Artificial Sequence
  targeting sequence with CTCN PAM
agccugggugacacagugag

SEQ ID NO: 7645 - RNA, 20 nt, Artificial Sequence
  targeting sequence with CTCN PAM
aucaugacucgcugcagccu

SEQ ID NO: 7646 - RNA, 20 nt, Artificial Sequence
  targeting sequence with CTCN PAM
cugcagccucuuccucccag

SEQ ID NO: 7647 - RNA, 20 nt, Artificial Sequence
  targeting sequence with CTCN PAM
uccucccaggcucaagagau

SEQ ID NO: 7648 - RNA, 20 nt, Artificial Sequence
  targeting sequence with CTCN PAM
caggcucaagagauccuccc

SEQ ID NO: 7649 - RNA, 20 nt, Artificial Sequence
  targeting sequence with CTCN PAM
agagauccucccaccucagc

SEQ ID NO: 7650 - RNA, 20 nt, Artificial Sequence
  targeting sequence with CTCN PAM
ugagccugggaggaagaggc

SEQ ID NO: 7651 - RNA, 20 nt, Artificial Sequence
  targeting sequence with CTCN PAM
caccucagccucccaaguag

SEQ ID NO: 7652 - RNA, 20 nt, Artificial Sequence
  targeting sequence with CTCN PAM
gccucccaaguagcagaaac

SEQ ID NO: 7653 - RNA, 20 nt, Artificial Sequence
  targeting sequence with CTCN PAM
caaguagcagaaaccacaag

SEQ ID NO: 7654 - RNA, 20 nt, Artificial Sequence
  targeting sequence with CTCN PAM
cucugccuuagccuccucau

SEQ ID NO: 7655 - RNA, 20 nt, Artificial Sequence
  targeting sequence with CTCN PAM
cugccuuagccuccucaucu

SEQ ID NO: 7656 - RNA, 20 nt, Artificial Sequence
  targeting sequence with CTCN PAM
gccuuagccuccucaucugu

SEQ ID NO: 7657 - RNA, 20 nt, Artificial Sequence
  targeting sequence with CTCN PAM
ucaucuguaaaaugggaauu

SEQ ID NO: 7658 - RNA, 20 nt, Artificial Sequence
  targeting sequence with CTCN PAM
ucuguaaaaugggaauugag

SEQ ID NO: 7659 - RNA, 20 nt, Artificial Sequence
  targeting sequence with CTCN PAM
auucccauuuuacagaugag

SEQ ID NO: 7660 - RNA, 20 nt, Artificial Sequence
  targeting sequence with CTCN PAM
aagagcugauuugugaggau

SEQ ID NO: 7661 - RNA, 20 nt, Artificial Sequence
  targeting sequence with CTCN PAM
uugagggaauccucaauucc

SEQ ID NO: 7662 - RNA, 20 nt, Artificial Sequence
  targeting sequence with CTCN PAM
caaaucagcucuuugaggga

SEQ ID NO: 7663 - RNA, 20 nt, Artificial Sequence
  targeting sequence with CTCN PAM
cccuccccccaccccccacu

SEQ ID NO: 7664 - RNA, 20 nt, Artificial Sequence
  targeting sequence with CTCN PAM
ccccaccccccacuguggcu

SEQ ID NO: 7665 - RNA, 20 nt, Artificial Sequence
  targeting sequence with CTCN PAM
cagcucacuuucaauaauga

SEQ ID NO: 7666 - RNA, 20 nt, Artificial Sequence
  targeting sequence with CTCN PAM
cuuucaauaaugaaagccca

SEQ ID NO: 7667 - RNA, 20 nt, Artificial Sequence
  targeting sequence with CTCN PAM
aggcuccuagacuguccugg

SEQ ID NO: 7668 - RNA, 20 nt, Artificial Sequence
  targeting sequence with CTCN PAM
cccaaggucacuucacaccu

SEQ ID NO: 7669 - RNA, 20 nt, Artificial Sequence
  targeting sequence with CTCN PAM
ccuaacucacccaaggucac

SEQ ID NO: 7670 - RNA, 20 nt, Artificial Sequence
  targeting sequence with CTCN PAM
uuaacucaccuaacucaccc

SEQ ID NO: 7671 - RNA, 20 nt, Artificial Sequence
  targeting sequence with CTCN PAM
uggucacaccagcaacucau

SEQ ID NO: 7672 - RNA, 20 nt, Artificial Sequence
  targeting sequence with CTCN PAM
ugugggcuuccaguuaggcc

SEQ ID NO: 7673 - RNA, 20 nt, Artificial Sequence
  targeting sequence with CTCN PAM
aggucaccagcaucaugaaa

SEQ ID NO: 7674 - RNA, 20 nt, Artificial Sequence
  targeting sequence with CTCN PAM
uucaugaugcuggugaccuu

SEQ ID NO: 7675 - RNA, 20 nt, Artificial Sequence
  targeting sequence with CTCN PAM
gccucuuucaugaugcuggu

SEQ ID NO: 7676 - RNA, 20 nt, Artificial Sequence
  targeting sequence with CTCN PAM
gcagcccugacucagccucu

SEQ ID NO: 7677 - RNA, 20 nt, Artificial Sequence
  targeting sequence with CTCN PAM
cuuaccuucuucaggacuuu

SEQ ID NO: 7678 - RNA, 20 nt, Artificial Sequence
  targeting sequence with CTCN PAM
cucccuuaccuucuucagga

SEQ ID NO: 7679 - RNA, 20 nt, Artificial Sequence
  targeting sequence with CTCN PAM
aggcagaaggaacagcaggu

SEQ ID NO: 7680 - RNA, 20 nt, Artificial Sequence
  targeting sequence with CTCN PAM
gcaccugcuguuccuucugc

SEQ ID NO: 7681 - RNA, 20 nt, Artificial Sequence
  targeting sequence with CTCN PAM
uccaucacacccacauccua

SEQ ID NO: 7682 - RNA, 20 nt, Artificial Sequence
  targeting sequence with CTCN PAM
ccuccuccaucacacccaca

SEQ ID NO: 7683 - RNA, 20 nt, Artificial Sequence
  targeting sequence with CTCN PAM
cauaaccccauccuuccggu

SEQ ID NO: 7684 - RNA, 20 nt, Artificial Sequence
  targeting sequence with CTCN PAM
ccaggccugccccucccaua

SEQ ID NO: 7685 - RNA, 20 nt, Artificial Sequence
  targeting sequence with CTCN PAM
gugccuuugcacaugcuggc

SEQ ID NO: 7686 - RNA, 20 nt, Artificial Sequence
  targeting sequence with CTCN PAM
gugccuaggagguuucuccu

SEQ ID NO: 7687 - RNA, 20 nt, Artificial Sequence
  targeting sequence with CTCN PAM
uaggcacagaggccagcaug

SEQ ID NO: 7688 - RNA, 20 nt, Artificial Sequence
  targeting sequence with CTCN PAM
ugccccgucagaacuccaac

SEQ ID NO: 7689 - RNA, 20 nt, Artificial Sequence
  targeting sequence with CTCN PAM
augcuuaccucugucaaaug

SEQ ID NO: 7690 - RNA, 20 nt, Artificial Sequence
  targeting sequence with CTCN PAM
gucaaaugggcgugcucuuu

SEQ ID NO: 7691 - RNA, 20 nt, Artificial Sequence
  targeting sequence with CTCN PAM
uucccucccugccucggggu

SEQ ID NO: 7692 - RNA, 20 nt, Artificial Sequence
  targeting sequence with CTCN PAM
cugccucggggugucauggg

SEQ ID NO: 7693 - RNA, 20 nt, Artificial Sequence
  targeting sequence with CTCN PAM
gggugucaugggagcccgcu

SEQ ID NO: 7694 - RNA, 20 nt, Artificial Sequence
  targeting sequence with CTCN PAM
caugacaccccgaggcaggg

SEQ ID NO: 7695 - RNA, 20 nt, Artificial Sequence
  targeting sequence with CTCN PAM
caaggaucccgaaagcuggg

SEQ ID NO: 7696 - RNA, 20 nt, Artificial Sequence
  targeting sequence with CTCN PAM
gcuggacgaugaaagacucc

SEQ ID NO: 7697 - RNA, 20 nt, Artificial Sequence
  targeting sequence with CTCN PAM
gcgcgcucugcuccccaguc

SEQ ID NO: 7698 - RNA, 20 nt, Artificial Sequence
  targeting sequence with CTCN PAM
gcuccccagucccccaggug

SEQ ID NO: 7699 - RNA, 20 nt, Artificial Sequence
  targeting sequence with CTCN PAM
ccagucccccagguggcccg

SEQ ID NO: 7700 - RNA, 20 nt, Artificial Sequence
  targeting sequence with CTCN PAM
gcaggcucgguuuccucgcc

SEQ ID NO: 7701 - RNA, 20 nt, Artificial Sequence
  targeting sequence with CTCN PAM
guuuccucgccugugaaaug

SEQ ID NO: 7702 - RNA, 20 nt, Artificial Sequence
  targeting sequence with CTCN PAM
ccugugaaaugcgggcgaug

SEQ ID NO: 7703 - RNA, 20 nt, Artificial Sequence
  targeting sequence with CTCN PAM
ccuccccgccgcgacugcuc

SEQ ID NO: 7704 - RNA, 20 nt, Artificial Sequence
  targeting sequence with CTCN PAM
ccgccgcgacugcucaucac

SEQ ID NO: 7705 - RNA, 20 nt, Artificial Sequence
  targeting sequence with CTCN PAM
gcgccgggcggcccacgagg

SEQ ID NO: 7706 - RNA, 20 nt, Artificial Sequence
  targeting sequence with CTCN PAM
ugggccgcccggcgcugagc

SEQ ID NO: 7707 - RNA, 20 nt, Artificial Sequence
  targeting sequence with CTCN PAM
auccccuucacauucacacg

SEQ ID NO: 7708 - RNA, 20 nt, Artificial Sequence
  targeting sequence with CTCN PAM
uuggguuccuccauccccuu

SEQ ID NO: 7709 - RNA, 20 nt, Artificial Sequence
  targeting sequence with CTCN PAM
aggccuggccuccuuggguu

SEQ ID NO: 7710 - RNA, 20 nt, Artificial Sequence
  targeting sequence with CTCN PAM
cagauuuggugcugucucca

SEQ ID NO: 7711 - RNA, 20 nt, Artificial Sequence
  targeting sequence with CTCN PAM
guaaaaugggaauaauaaug

SEQ ID NO: 7712 - RNA, 20 nt, Artificial Sequence
  targeting sequence with CTCN PAM
ucuguaaaaugggaauaaua

SEQ ID NO: 7713 - RNA, 20 nt, Artificial Sequence
  targeting sequence with CTCN PAM
guuuccuccucuguaaaaug

SEQ ID NO: 7714 - RNA, 20 nt, Artificial Sequence
  targeting sequence with CTCN PAM
cagcugcagaacuguacccu

SEQ ID NO: 7715 - RNA, 20 nt, Artificial Sequence
  targeting sequence with CTCN PAM
gcugcagaacuguacccugu

SEQ ID NO: 7716 - RNA, 20 nt, Artificial Sequence
  targeting sequence with CTCN PAM
agaaaacaggguacaguucu

SEQ ID NO: 7717 - RNA, 20 nt, Artificial Sequence
  targeting sequence with CTCN PAM
caccuuccagcucuagaaaa

SEQ ID NO: 7718 - RNA, 20 nt, Artificial Sequence
  targeting sequence with CTCN PAM
accccacaguaggcaaauga

SEQ ID NO: 7719 - RNA, 20 nt, Artificial Sequence
  targeting sequence with CTCN PAM
uuugccuacugugggguuga

SEQ ID NO: 7720 - RNA, 20 nt, Artificial Sequence
  targeting sequence with CTCN PAM
cacucucccuccccugugug

SEQ ID NO: 7721 - RNA, 20 nt, Artificial Sequence
  targeting sequence with CTCN PAM
cucagauucacacacacacu

SEQ ID NO: 7722 - RNA, 20 nt, Artificial Sequence
  targeting sequence with CTCN PAM
gauucacacacacacuccag

SEQ ID NO: 7723 - RNA, 20 nt, Artificial Sequence
  targeting sequence with CTCN PAM
aggccagccgggcccagagg

SEQ ID NO: 7724 - RNA, 20 nt, Artificial Sequence
  targeting sequence with CTCN PAM
gggcccggcuggccuggagu

SEQ ID NO: 7725 - RNA, 20 nt, Artificial Sequence
  targeting sequence with CTCN PAM
ccuucccucugggcccggcu

SEQ ID NO: 7726 - RNA, 20 nt, Artificial Sequence
  targeting sequence with CTCN PAM
caccuucccucugggcccgg

SEQ ID NO: 7727 - RNA, 20 nt, Artificial Sequence
  targeting sequence with CTCN PAM
uugcccucucaccuucccuc

SEQ ID NO: 7728 - RNA, 20 nt, Artificial Sequence
  targeting sequence with CTCN PAM
cuucaacggacccacaccca

SEQ ID NO: 7729 - RNA, 20 nt, Artificial Sequence
  targeting sequence with CTCN PAM
agcccuguugaacugguggg

SEQ ID NO: 7730 - RNA, 20 nt, Artificial Sequence
  targeting sequence with CTCN PAM
ucagccauggcugccuggcc

SEQ ID NO: 7731 - RNA, 20 nt, Artificial Sequence
  targeting sequence with CTCN PAM
guacguuccucaugagccau

SEQ ID NO: 7732 - RNA, 20 nt, Artificial Sequence
  targeting sequence with CTCN PAM
ugagccaugaucggccccag

SEQ ID NO: 7733 - RNA, 20 nt, Artificial Sequence
  targeting sequence with CTCN PAM
ugaggaacguaccgagggcc

SEQ ID NO: 7734 - RNA, 20 nt, Artificial Sequence
  targeting sequence with CTCN PAM
agaugaugcccccgaucacc

SEQ ID NO: 7735 - RNA, 20 nt, Artificial Sequence
  targeting sequence with CTCN PAM
ucccaucacuaaauuacaca

SEQ ID NO: 7736 - RNA, 20 nt, Artificial Sequence
  targeting sequence with CTCN PAM
caaaccagugcucuucccau

SEQ ID NO: 7737 - RNA, 20 nt, Artificial Sequence
  targeting sequence with CTCN PAM
ggacucccaaaccagugcuc

SEQ ID NO: 7738 - RNA, 20 nt, Artificial Sequence
  targeting sequence with CTCN PAM
cuaugaccuuugucuuucug

SEQ ID NO: 7739 - RNA, 20 nt, Artificial Sequence
  targeting sequence with CTCN PAM
augaccuuugucuuucugag

SEQ ID NO: 7740 - RNA, 20 nt, Artificial Sequence
  targeting sequence with CTCN PAM
uggcauuuccauuccacaga

SEQ ID NO: 7741 - RNA, 20 nt, Artificial Sequence
  targeting sequence with CTCN PAM
aggcauugaagauucgcaac

SEQ ID NO: 7742 - RNA, 20 nt, Artificial Sequence
  targeting sequence with CTCN PAM
cuaggcauugaagauucgca

SEQ ID NO: 7743 - RNA, 20 nt, Artificial Sequence
  targeting sequence with CTCN PAM
cugggucuguaccugaccag

SEQ ID NO: 7744 - RNA, 20 nt, Artificial Sequence
  targeting sequence with CTCN PAM
uuuucucccugggucuguac

SEQ ID NO: 7745 - RNA, 20 nt, Artificial Sequence
  targeting sequence with CTCN PAM
ccagcccugcccccuccacg

SEQ ID NO: 7746 - RNA, 20 nt, Artificial Sequence
  targeting sequence with CTCN PAM
acgggccaacccugggcugu

SEQ ID NO: 7747 - RNA, 20 nt, Artificial Sequence
  targeting sequence with CTCN PAM
agcacugaacagaaugacag

SEQ ID NO: 7748 - RNA, 20 nt, Artificial Sequence
  targeting sequence with CTCN PAM
gucugugcaauuccuugagc

SEQ ID NO: 7749 - RNA, 20 nt, Artificial Sequence
  targeting sequence with CTCN PAM
aggaauugcacagacagagg

SEQ ID NO: 7750 - RNA, 20 nt, Artificial Sequence
  targeting sequence with CTCN PAM
gcucaaggaauugcacagac

SEQ ID NO: 7751 - RNA, 20 nt, Artificial Sequence
  targeting sequence with CTCN PAM
cagugaccucugcucaagga

SEQ ID NO: 7752 - RNA, 20 nt, Artificial Sequence
  targeting sequence with CTCN PAM
ugucaccacugcuauuauaa

SEQ ID NO: 7753 - RNA, 20 nt, Artificial Sequence
  targeting sequence with CTCN PAM
ccucuaccgucacucccauc

SEQ ID NO: 7754 - RNA, 20 nt, Artificial Sequence
  targeting sequence with CTCN PAM
ccuccccucuaccgucacuc

SEQ ID NO: 7755 - RNA, 20 nt, Artificial Sequence
  targeting sequence with CTCN PAM
ccuccccuccccucuaccgu

SEQ ID NO: 7756 - RNA, 20 nt, Artificial Sequence
  targeting sequence with CTCN PAM
uccccuccccuccccucuac

SEQ ID NO: 7757 - RNA, 20 nt, Artificial Sequence
  targeting sequence with CTCN PAM
uuaauacccagcaauauucc

SEQ ID NO: 7758 - RNA, 20 nt, Artificial Sequence
  targeting sequence with CTCN PAM
acagcacgugaacccaugaa

SEQ ID NO: 7759 - RNA, 20 nt, Artificial Sequence
  targeting sequence with CTCN PAM
uucaugucccacuucuguga

SEQ ID NO: 7760 - RNA, 20 nt, Artificial Sequence
  targeting sequence with CTCN PAM
uucugccaaggucacagaag

SEQ ID NO: 7761 - RNA, 20 nt, Artificial Sequence
  targeting sequence with CTCN PAM
cccucagcucugagccuugu

SEQ ID NO: 7762 - RNA, 20 nt, Artificial Sequence
  targeting sequence with CTCN PAM
gcucugagccuuguacggcu

SEQ ID NO: 7763 - RNA, 20 nt, Artificial Sequence
  targeting sequence with CTCN PAM
gagccuuguacggcugauug

SEQ ID NO: 7764 - RNA, 20 nt, Artificial Sequence
  targeting sequence with CTCN PAM
gagcugagggggagggacuc

SEQ ID NO: 7765 - RNA, 20 nt, Artificial Sequence
  targeting sequence with CTCN PAM
gugaagccuguuuccucccc

SEQ ID NO: 7766 - RNA, 20 nt, Artificial Sequence
  targeting sequence with CTCN PAM
ccuucucugugaagccuguu

SEQ ID NO: 7767 - RNA, 20 nt, Artificial Sequence
  targeting sequence with CTCN PAM
ccuacaaagcccagcucacc

SEQ ID NO: 7768 - RNA, 20 nt, Artificial Sequence
  targeting sequence with CTCN PAM
uaucucaccuacaaagccca

SEQ ID NO: 7769 - RNA, 20 nt, Artificial Sequence
  targeting sequence with CTCN PAM
gcuuggugaacucuuaucuc

SEQ ID NO: 7770 - RNA, 20 nt, Artificial Sequence
  targeting sequence with CTCN PAM
ccacugguauggcugccccc

SEQ ID NO: 7771 - RNA, 20 nt, Artificial Sequence
  targeting sequence with CTCN PAM
ggucuuggugagagcugaca

SEQ ID NO: 7772 - RNA, 20 nt, Artificial Sequence
  targeting sequence with CTCN PAM
ccaagaccagagaagaagcc

SEQ ID NO: 7773 - RNA, 20 nt, Artificial Sequence
  targeting sequence with CTCN PAM
caccaagaccagagaagaag

SEQ ID NO: 7774 - RNA, 20 nt, Artificial Sequence
  targeting sequence with CTCN PAM
gggaauuggcaaaccucucc

SEQ ID NO: 7775 - RNA, 20 nt, Artificial Sequence
  targeting sequence with CTCN PAM
gugcaguugaccaggguagg

SEQ ID NO: 7776 - RNA, 20 nt, Artificial Sequence
  targeting sequence with CTCN PAM
ccuuugcuugcagaucaccu

SEQ ID NO: 7777 - RNA, 20 nt, Artificial Sequence
  targeting sequence with CTCN PAM
uuugcuugcagaucaccuuc

SEQ ID NO: 7778 - RNA, 20 nt, Artificial Sequence
  targeting sequence with CTCN PAM
gacuuucaaggcauccucuc

SEQ ID NO: 7779 - RNA, 20 nt, Artificial Sequence
  targeting sequence with CTCN PAM
ccccaaaggccaugggccug

SEQ ID NO: 7780 - RNA, 20 nt, Artificial Sequence
  targeting sequence with CTCN PAM
ccaaaggccaugggccugcu

SEQ ID NO: 7781 - RNA, 20 nt, Artificial Sequence
  targeting sequence with CTCN PAM
agcaggcccauggccuuugg

SEQ ID NO: 7782 - RNA, 20 nt, Artificial Sequence
  targeting sequence with CTCN PAM
gcagcaagcccauucuccag

SEQ ID NO: 7783 - RNA, 20 nt, Artificial Sequence
  targeting sequence with CTCN PAM
ucaucucggcagcaagccca

SEQ ID NO: 7784 - RNA, 20 nt, Artificial Sequence
  targeting sequence with CTCN PAM
cgggaggggaggaguaagcc

SEQ ID NO: 7785 - RNA, 20 nt, Artificial Sequence
  targeting sequence with CTCN PAM
ggaggggaggaguaagcccc

SEQ ID NO: 7786 - RNA, 20 nt, Artificial Sequence
  targeting sequence with CTCN PAM
cgagagggccuggcaccuac

SEQ ID NO: 7787 - RNA, 20 nt, Artificial Sequence
  targeting sequence with CTCN PAM
ccucccgagagggccuggca

SEQ ID NO: 7788 - RNA, 20 nt, Artificial Sequence
  targeting sequence with CTCN PAM
uccccucccgagagggccug

SEQ ID NO: 7789 - RNA, 20 nt, Artificial Sequence
  targeting sequence with CTCN PAM
ccugacugaggagagugaga

SEQ ID NO: 7790 - RNA, 20 nt, Artificial Sequence
  targeting sequence with CTCN PAM
gucaggggagacuggccuau

SEQ ID NO: 7791 - RNA, 20 nt, Artificial Sequence
  targeting sequence with CTCN PAM
ucagucaggggagacuggcc

SEQ ID NO: 7792 - RNA, 20 nt, Artificial Sequence
  targeting sequence with CTCN PAM
ccucagucaggggagacugg

SEQ ID NO: 7793 - RNA, 20 nt, Artificial Sequence
  targeting sequence with CTCN PAM
cucuccucagucaggggaga

SEQ ID NO: 7794 - RNA, 20 nt, Artificial Sequence
  targeting sequence with CTCN PAM
cacucuccucagucagggga

SEQ ID NO: 7795 - RNA, 20 nt, Artificial Sequence
  targeting sequence with CTCN PAM
cucucacucuccucagucag

SEQ ID NO: 7796 - RNA, 20 nt, Artificial Sequence
  targeting sequence with CTCN PAM
cagaauugagaguugaaaac

SEQ ID NO: 7797 - RNA, 20 nt, Artificial Sequence
  targeting sequence with CTCN PAM
ucuguacaaugggaauaaua

SEQ ID NO: 7798 - RNA, 20 nt, Artificial Sequence
  targeting sequence with CTCN PAM
guuuccucaucuguacaaug

SEQ ID NO: 7799 - RNA, 20 nt, Artificial Sequence
  targeting sequence with CTCN PAM
ucccugacaagacaaagucc

SEQ ID NO: 7800 - RNA, 20 nt, Artificial Sequence
  targeting sequence with CTCN PAM
augaaacaaaucauacaaug

SEQ ID NO: 7801 - RNA, 20 nt, Artificial Sequence
  targeting sequence with CTCN PAM
uuauacagcuaggaagauug

SEQ ID NO: 7802 - RNA, 20 nt, Artificial Sequence
  targeting sequence with CTCN PAM
aucuuccuagcuguauaaag

SEQ ID NO: 7803 - RNA, 20 nt, Artificial Sequence
  targeting sequence with CTCN PAM
gagaaguguagucacuagcc

SEQ ID NO: 7804 - RNA, 20 nt, Artificial Sequence
  targeting sequence with CTCN PAM
gagccucaaucuuccuagcu

SEQ ID NO: 7805 - RNA, 20 nt, Artificial Sequence
  targeting sequence with CTCN PAM
uggggagucagugauggaag

SEQ ID NO: 7806 - RNA, 20 nt, Artificial Sequence
  targeting sequence with CTCN PAM
ccaugagguuuggggcuagu

SEQ ID NO: 7807 - RNA, 20 nt, Artificial Sequence
  targeting sequence with CTCN PAM
cucccacuccagccccaguc

SEQ ID NO: 7808 - RNA, 20 nt, Artificial Sequence
  targeting sequence with CTCN PAM
cccacuccagccccaguccc

SEQ ID NO: 7809 - RNA, 20 nt, Artificial Sequence
  targeting sequence with CTCN PAM
cacuccagccccagucccca

SEQ ID NO: 7810 - RNA, 20 nt, Artificial Sequence
  targeting sequence with CTCN PAM
agccccaguccccagccgcc

SEQ ID NO: 7811 - RNA, 20 nt, Artificial Sequence
  targeting sequence with CTCN PAM
cacagccuuacauagggcgg

SEQ ID NO: 7812 - RNA, 20 nt, Artificial Sequence
  targeting sequence with CTCN PAM
ggucauaggcggcuuccucc

SEQ ID NO: 7813 - RNA, 20 nt, Artificial Sequence
  targeting sequence with CTCN PAM
ugacuuucaucuggaugugg

SEQ ID NO: 7814 - RNA, 20 nt, Artificial Sequence
  targeting sequence with CTCN PAM
cuguagcucaugacuuucau

SEQ ID NO: 7815 - RNA, 20 nt, Artificial Sequence
  targeting sequence with CTCN PAM
uugcuggccccugagauggg

SEQ ID NO: 7816 - RNA, 20 nt, Artificial Sequence
  targeting sequence with CTCN PAM
ggggccagcaaggagcggug

SEQ ID NO: 7817 - RNA, 20 nt, Artificial Sequence
  targeting sequence with CTCN PAM
aucacugguucccagcuucg

SEQ ID NO: 7818 - RNA, 20 nt, Artificial Sequence
  targeting sequence with CTCN PAM
uccaucacugguucccagcu

SEQ ID NO: 7819 - RNA, 20 nt, Artificial Sequence
  targeting sequence with CTCN PAM
auccaggccugaacgucgcc

SEQ ID NO: 7820 - RNA, 20 nt, Artificial Sequence
  targeting sequence with CTCN PAM
gacgagagugaaggggaaag

SEQ ID NO: 7821 - RNA, 20 nt, Artificial Sequence
  targeting sequence with CTCN PAM
ucugagcccuuguggaugac

SEQ ID NO: 7822 - RNA, 20 nt, Artificial Sequence
  targeting sequence with CTCN PAM
cgucugagcccuuguggaug

SEQ ID NO: 7823 - RNA, 20 nt, Artificial Sequence
  targeting sequence with CTCN PAM
gagcuggcccgggugagugc

SEQ ID NO: 7824 - RNA, 20 nt, Artificial Sequence
  targeting sequence with CTCN PAM
gaguuaggcgucuuuccccu

SEQ ID NO: 7825 - RNA, 20 nt, Artificial Sequence
  targeting sequence with CTCN PAM
cccgggccagcucugaguua

SEQ ID NO: 7826 - RNA, 20 nt, Artificial Sequence
  targeting sequence with CTCN PAM
aagcacucacccgggccagc

SEQ ID NO: 7827 - RNA, 20 nt, Artificial Sequence
  targeting sequence with CTCN PAM
ugcccucuaagcacucaccc

SEQ ID NO: 7828 - RNA, 20 nt, Artificial Sequence
  targeting sequence with CTCN PAM
ccuuacccccagugucccca

SEQ ID NO: 7829 - RNA, 20 nt, Artificial Sequence
  targeting sequence with CTCN PAM
acugcccucuccuuaccccc

SEQ ID NO: 7830 - RNA, 20 nt, Artificial Sequence
  targeting sequence with CTCN PAM
gggugucccacacccuccac

SEQ ID NO: 7831 - RNA, 20 nt, Artificial Sequence
  targeting sequence with CTCN PAM
uuugucugccacaucugcca

SEQ ID NO: 7832 - RNA, 20 nt, Artificial Sequence
  targeting sequence with CTCN PAM
caagcccauacucauuuguc

SEQ ID NO: 7833 - RNA, 20 nt, Artificial Sequence
  targeting sequence with CTCN PAM
guucaaaccccagcuccugu

SEQ ID NO: 7834 - RNA, 20 nt, Artificial Sequence
  targeting sequence with CTCN PAM
ugugcuguguagcuguggua

SEQ ID NO: 7835 - RNA, 20 nt, Artificial Sequence
  targeting sequence with CTCN PAM
guuuccccacacagggauga

SEQ ID NO: 7836 - RNA, 20 nt, Artificial Sequence
  targeting sequence with CTCN PAM
acauuccuggguaguaggaa

SEQ ID NO: 7837 - RNA, 20 nt, Artificial Sequence
  targeting sequence with CTCN PAM
gaaugcuugucgugaguagc

SEQ ID NO: 7838 - RNA, 20 nt, Artificial Sequence
  targeting sequence with CTCN PAM
cgacaagcauucagagacau

SEQ ID NO: 7839 - RNA, 20 nt, Artificial Sequence
  targeting sequence with CTCN PAM
uggcccccugcuacucacga

SEQ ID NO: 7840 - RNA, 20 nt, Artificial Sequence
  targeting sequence with CTCN PAM
ggcuccuggcccccugcuac

SEQ ID NO: 7841 - RNA, 20 nt, Artificial Sequence
  targeting sequence with CTCN PAM
gguccucuggcuccuggccc

SEQ ID NO: 7842 - RNA, 20 nt, Artificial Sequence
  targeting sequence with CTCN PAM
gugaccuugggcaaggcccu

SEQ ID NO: 7843 - RNA, 20 nt, Artificial Sequence
  targeting sequence with CTCN PAM
ccacuccacucccaucccug

SEQ ID NO: 7844 - RNA, 20 nt, Artificial Sequence
  targeting sequence with CTCN PAM
acucccaucccugucuguuu

SEQ ID NO: 7845 - RNA, 20 nt, Artificial Sequence
  targeting sequence with CTCN PAM
caucccugucuguuugugaa

SEQ ID NO: 7846 - RNA, 20 nt, Artificial Sequence
  targeting sequence with CTCN PAM
guucacaaacagacagggau

SEQ ID NO: 7847 - RNA, 20 nt, Artificial Sequence
  targeting sequence with CTCN PAM
uuauucauccauguacuuau

SEQ ID NO: 7848 - RNA, 20 nt, Artificial Sequence
  targeting sequence with CTCN PAM
guaauguggauggaaugaau

SEQ ID NO: 7849 - RNA, 20 nt, Artificial Sequence
  targeting sequence with CTCN PAM
gggguagauuccagugaagg

SEQ ID NO: 7850 - RNA, 20 nt, Artificial Sequence
  targeting sequence with CTCN PAM
ucagggguagauuccaguga

SEQ ID NO: 7851 - RNA, 20 nt, Artificial Sequence
  targeting sequence with CTCN PAM
gaguccaaugagggaggcaa

SEQ ID NO: 7852 - RNA, 20 nt, Artificial Sequence
  targeting sequence with CTCN PAM
gagcuccucagggguagauu

SEQ ID NO: 7853 - RNA, 20 nt, Artificial Sequence
  targeting sequence with CTCN PAM
uuggacucagagcuccucag

SEQ ID NO: 7854 - RNA, 20 nt, Artificial Sequence
  targeting sequence with CTCN PAM
cucauuggacucagagcucc

SEQ ID NO: 7855 - RNA, 20 nt, Artificial Sequence
  targeting sequence with CTCN PAM
guguaacugggccuaugagc

SEQ ID NO: 7856 - RNA, 20 nt, Artificial Sequence
  targeting sequence with CTCN PAM
uaggcccaguuacacugagg

SEQ ID NO: 7857 - RNA, 20 nt, Artificial Sequence
  targeting sequence with CTCN PAM
guugcucauaggcccaguua

SEQ ID NO: 7858 - RNA, 20 nt, Artificial Sequence
  targeting sequence with CTCN PAM
ucuguugcucauaggcccag

SEQ ID NO: 7859 - RNA, 20 nt, Artificial Sequence
  targeting sequence with CTCN PAM
aauuauucaggguucuccuc

SEQ ID NO: 7860 - RNA, 20 nt, Artificial Sequence
  targeting sequence with CTCN PAM
ucuacuucuccaauuauuca

SEQ ID NO: 7861 - RNA, 20 nt, Artificial Sequence
  targeting sequence with CTCN PAM
ugaaauagggcuauuacuau

SEQ ID NO: 7862 - RNA, 20 nt, Artificial Sequence
  targeting sequence with CTCN PAM
ugcaguucuuucuuagguuu

SEQ ID NO: 7863 - RNA, 20 nt, Artificial Sequence
  targeting sequence with CTCN PAM
guuucuucccaauaacagaa

SEQ ID NO: 7864 - RNA, 20 nt, Artificial Sequence
  targeting sequence with CTCN PAM
gagauacccuugcccuugug

SEQ ID NO: 7865 - RNA, 20 nt, Artificial Sequence
  targeting sequence with CTCN PAM
gagucagaaugccugggucc

SEQ ID NO: 7866 - RNA, 20 nt, Artificial Sequence
  targeting sequence with CTCN PAM
agugaaggcagcagccccaa

SEQ ID NO: 7867 - RNA, 20 nt, Artificial Sequence
  targeting sequence with CTCN PAM
acaugacagggaggaagcuu

SEQ ID NO: 7868 - RNA, 20 nt, Artificial Sequence
  targeting sequence with CTCN PAM
cugucauguggagaugcauu

SEQ ID NO: 7869 - RNA, 20 nt, Artificial Sequence
  targeting sequence with CTCN PAM
gggcugcaggugcccgcugg

SEQ ID NO: 7870 - RNA, 20 nt, Artificial Sequence
  targeting sequence with CTCN PAM
aacguuggggcaucaaucag

SEQ ID NO: 7871 - RNA, 20 nt, Artificial Sequence
  targeting sequence with CTCN PAM
uccuccaacguuggggcauc

SEQ ID NO: 7872 - RNA, 20 nt, Artificial Sequence
  targeting sequence with CTCN PAM
uggggcucauccuccaacgu

SEQ ID NO: 7873 - RNA, 20 nt, Artificial Sequence
  targeting sequence with CTCN PAM
accuuuguccuuggguaccg

SEQ ID NO: 7874 - RNA, 20 nt, Artificial Sequence
  targeting sequence with CTCN PAM
uccaccuuuguccuugggua

SEQ ID NO: 7875 - RNA, 20 nt, Artificial Sequence
  targeting sequence with CTCN PAM
uucuccuccaccuuuguccu

SEQ ID NO: 7876 - RNA, 20 nt, Artificial Sequence
  targeting sequence with CTCN PAM
ccaccuguguccgaagccuc

SEQ ID NO: 7877 - RNA, 20 nt, Artificial Sequence
  targeting sequence with CTCN PAM
gguuccuccccaccuguguc

SEQ ID NO: 7878 - RNA, 20 nt, Artificial Sequence
  targeting sequence with CTCN PAM
uccuucucagguuccucccc

SEQ ID NO: 7879 - RNA, 20 nt, Artificial Sequence
  targeting sequence with CTCN PAM
aucuggcagcccauaguaca

SEQ ID NO: 7880 - RNA, 20 nt, Artificial Sequence
  targeting sequence with CTCN PAM
ucccggacaaggagcugggu

SEQ ID NO: 7881 - RNA, 20 nt, Artificial Sequence
  targeting sequence with CTCN PAM
cggacaaggagcuggguuuu

SEQ ID NO: 7882 - RNA, 20 nt, Artificial Sequence
  targeting sequence with CTCN PAM
uuguccgggaggaggucccc

SEQ ID NO: 7883 - RNA, 20 nt, Artificial Sequence
  targeting sequence with CTCN PAM
aaacccagcuccuuguccgg

SEQ ID NO: 7884 - RNA, 20 nt, Artificial Sequence
  targeting sequence with CTCN PAM
gccuugggugucaggcucaa

SEQ ID NO: 7885 - RNA, 20 nt, Artificial Sequence
  targeting sequence with CTCN PAM
guagcuucuagucuggaacu

SEQ ID NO: 7886 - RNA, 20 nt, Artificial Sequence
  targeting sequence with CTCN PAM
acaaaucauauuuugccuuc

SEQ ID NO: 7887 - RNA, 20 nt, Artificial Sequence
  targeting sequence with CTCN PAM
gagaggaaccuuccuuggug

SEQ ID NO: 7888 - RNA, 20 nt, Artificial Sequence
  targeting sequence with CTCN PAM
gaggucagcuuugggggaag

SEQ ID NO: 7889 - RNA, 20 nt, Artificial Sequence
  targeting sequence with CTCN PAM
cagaggucagcuuuggggga

SEQ ID NO: 7890 - RNA, 20 nt, Artificial Sequence
  targeting sequence with CTCN PAM
cucugggccccugauccuuu

SEQ ID NO: 7891 - RNA, 20 nt, Artificial Sequence
  targeting sequence with CTCN PAM
gggccccugauccuuuguga

SEQ ID NO: 7892 - RNA, 20 nt, Artificial Sequence
  targeting sequence with CTCN PAM
gcagcugccaggauccuggg

SEQ ID NO: 7893 - RNA, 20 nt, Artificial Sequence
  targeting sequence with CTCN PAM
aaccaggaccacgcccucag

SEQ ID NO: 7894 - RNA, 20 nt, Artificial Sequence
  targeting sequence with CTCN PAM
gagccugcacccugggccac

SEQ ID NO: 7895 - RNA, 20 nt, Artificial Sequence
  targeting sequence with CTCN PAM
gagggcgugguccugguuug

SEQ ID NO: 7896 - RNA, 20 nt, Artificial Sequence
  targeting sequence with CTCN PAM
cagguggcccagggugcagg

SEQ ID NO: 7897 - RNA, 20 nt, Artificial Sequence
  targeting sequence with CTCN PAM
gacucccagguggcccaggg

SEQ ID NO: 7898 - RNA, 20 nt, Artificial Sequence
  targeting sequence with CTCN PAM
acccagaaccccauagccca

SEQ ID NO: 7899 - RNA, 20 nt, Artificial Sequence
  targeting sequence with CTCN PAM
acccggaagcccuucccuag

SEQ ID NO: 7900 - RNA, 20 nt, Artificial Sequence
  targeting sequence with CTCN PAM
uucccuaggccaggaccccc

SEQ ID NO: 7901 - RNA, 20 nt, Artificial Sequence
  targeting sequence with CTCN PAM
gcagugaaggaugccacagg

SEQ ID NO: 7902 - RNA, 20 nt, Artificial Sequence
  targeting sequence with CTCN PAM
cugcugucaugacucaggac

SEQ ID NO: 7903 - RNA, 20 nt, Artificial Sequence
  targeting sequence with CTCN PAM
gcugucaugacucaggacag

SEQ ID NO: 7904 - RNA, 20 nt, Artificial Sequence
  targeting sequence with CTCN PAM
ggacaggaguuccuggucac

SEQ ID NO: 7905 - RNA, 20 nt, Artificial Sequence
  targeting sequence with CTCN PAM
uguccugagucaugacagca

SEQ ID NO: 7906 - RNA, 20 nt, Artificial Sequence
  targeting sequence with CTCN PAM
gcugugaccaggaacuccug

SEQ ID NO: 7907 - RNA, 20 nt, Artificial Sequence
  targeting sequence with CTCN PAM
uccgaagacucagcugugac

SEQ ID NO: 7908 - RNA, 20 nt, Artificial Sequence
  targeting sequence with CTCN PAM
ccucauccgaagacucagcu

SEQ ID NO: 7909 - RNA, 20 nt, Artificial Sequence
  targeting sequence with CTCN PAM
ugugcucuguugccuaaggc

SEQ ID NO: 7910 - RNA, 20 nt, Artificial Sequence
  targeting sequence with CTCN PAM
guugccuaaggcagggcagc

SEQ ID NO: 7911 - RNA, 20 nt, Artificial Sequence
  targeting sequence with CTCN PAM
gggcaggauacgugaggccu

SEQ ID NO: 7912 - RNA, 20 nt, Artificial Sequence
  targeting sequence with CTCN PAM
cguauccugccccgagggaa

SEQ ID NO: 7913 - RNA, 20 nt, Artificial Sequence
  targeting sequence with CTCN PAM
ggugcccgucaggcguaagg

SEQ ID NO: 7914 - RNA, 20 nt, Artificial Sequence
  targeting sequence with CTCN PAM
uccggaaguaagcccucacu

SEQ ID NO: 7915 - RNA, 20 nt, Artificial Sequence
  targeting sequence with CTCN PAM
cugcaguggcaugaccgugg

SEQ ID NO: 7916 - RNA, 20 nt, Artificial Sequence
  targeting sequence with CTCN PAM
ggagugauuccccacacccc

SEQ ID NO: 7917 - RNA, 20 nt, Artificial Sequence
  targeting sequence with CTCN PAM
ugagauucagcaccacacag

SEQ ID NO: 7918 - RNA, 20 nt, Artificial Sequence
  targeting sequence with CTCN PAM
uguuuaagucuaaagccacu

SEQ ID NO: 7919 - RNA, 20 nt, Artificial Sequence
  targeting sequence with CTCN PAM
gguugcugggccugccagca

SEQ ID NO: 7920 - RNA, 20 nt, Artificial Sequence
  targeting sequence with CTCN PAM
agaacaggguuaccaucuuc

SEQ ID NO: 7921 - RNA, 20 nt, Artificial Sequence
  targeting sequence with CTCN PAM
acuaccccaagcccccugca

SEQ ID NO: 7922 - RNA, 20 nt, Artificial Sequence
  targeting sequence with CTCN PAM
cuccacuaccccaagccccc

SEQ ID NO: 7923 - RNA, 20 nt, Artificial Sequence
  targeting sequence with CTCN PAM
ccaucucacuccacuacccc

SEQ ID NO: 7924 - RNA, 20 nt, Artificial Sequence
  targeting sequence with CTCN PAM
cuggcucuugcugcaugaug

SEQ ID NO: 7925 - RNA, 20 nt, Artificial Sequence
  targeting sequence with CTCN PAM
ugcugcaugauggggagacc

SEQ ID NO: 7926 - RNA, 20 nt, Artificial Sequence
  targeting sequence with CTCN PAM
ccaucaugcagcaagagcca

SEQ ID NO: 7927 - RNA, 20 nt, Artificial Sequence
  targeting sequence with CTCN PAM
gcuaaguuauuaggaggccc

SEQ ID NO: 7928 - RNA, 20 nt, Artificial Sequence
  targeting sequence with CTCN PAM
uaauaacuuagcagaggcag

SEQ ID NO: 7929 - RNA, 20 nt, Artificial Sequence
  targeting sequence with CTCN PAM
aagauaccucauuuggauga

SEQ ID NO: 7930 - RNA, 20 nt, Artificial Sequence
  targeting sequence with CTCN PAM
uuuggaugauacaauguuac

SEQ ID NO: 7931 - RNA, 20 nt, Artificial Sequence
  targeting sequence with CTCN PAM
gugaccuuugacaagucugg

SEQ ID NO: 7932 - RNA, 20 nt, Artificial Sequence
  targeting sequence with CTCN PAM
guagcccucagcuuucucau

SEQ ID NO: 7933 - RNA, 20 nt, Artificial Sequence
  targeting sequence with CTCN PAM
gcuuucucaugugcaaauga

SEQ ID NO: 7934 - RNA, 20 nt, Artificial Sequence
  targeting sequence with CTCN PAM
ugugcaaaugacagaugaag

SEQ ID NO: 7935 - RNA, 20 nt, Artificial Sequence
  targeting sequence with CTCN PAM
caguggucuuuggcugcagg

SEQ ID NO: 7936 - RNA, 20 nt, Artificial Sequence
  targeting sequence with CTCN PAM
ccugugguuaacaagcuggg

SEQ ID NO: 7937 - RNA, 20 nt, Artificial Sequence
  targeting sequence with CTCN PAM
cccugguucgcugugguguu

SEQ ID NO: 7938 - RNA, 20 nt, Artificial Sequence
  targeting sequence with CTCN PAM
gaaagagguauuagaaagga

SEQ ID NO: 7939 - RNA, 20 nt, Artificial Sequence
  targeting sequence with CTCN PAM
uucagagacucccccugguu

SEQ ID NO: 7940 - RNA, 20 nt, Artificial Sequence
  targeting sequence with CTCN PAM
ccugucagguuggagggacu

SEQ ID NO: 7941 - RNA, 20 nt, Artificial Sequence
  targeting sequence with CTCN PAM
ugucagguuggagggacucu

SEQ ID NO: 7942 - RNA, 20 nt, Artificial Sequence
  targeting sequence with CTCN PAM
aaccugacaggagagugacc

SEQ ID NO: 7943 - RNA, 20 nt, Artificial Sequence
  targeting sequence with CTCN PAM
ggaaguuuccacccucugga

SEQ ID NO: 7944 - RNA, 20 nt, Artificial Sequence
  targeting sequence with CTCN PAM
ggagagggaaaggcccugga

SEQ ID NO: 7945 - RNA, 20 nt, Artificial Sequence
  targeting sequence with CTCN PAM
agaggguggaaacuuccaga

SEQ ID NO: 7946 - RNA, 20 nt, Artificial Sequence
  targeting sequence with CTCN PAM
ccagaggguggaaacuucca

SEQ ID NO: 7947 - RNA, 20 nt, Artificial Sequence
  targeting sequence with CTCN PAM
agggccuuucccucuccaga

SEQ ID NO: 7948 - RNA, 20 nt, Artificial Sequence
  targeting sequence with CTCN PAM
gccgaccgcucgccaugacc

SEQ ID NO: 7949 - RNA, 20 nt, Artificial Sequence
  targeting sequence with CTCN PAM
ccaugaccuuggguacauca

SEQ ID NO: 7950 - RNA, 20 nt, Artificial Sequence
  targeting sequence with CTCN PAM
cugggcuccucuauucucug

SEQ ID NO: 7951 - RNA, 20 nt, Artificial Sequence
  targeting sequence with CTCN PAM
ucuauucucuguaaaauugg

SEQ ID NO: 7952 - RNA, 20 nt, Artificial Sequence
  targeting sequence with CTCN PAM
auucucuguaaaauugggug

SEQ ID NO: 7953 - RNA, 20 nt, Artificial Sequence
  targeting sequence with CTCN PAM
guaaaauugggugagggugg

SEQ ID NO: 7954 - RNA, 20 nt, Artificial Sequence
  targeting sequence with CTCN PAM
agaaucagaaagaccugguu

SEQ ID NO: 7955 - RNA, 20 nt, Artificial Sequence
  targeting sequence with CTCN PAM
cagagccucaauguccacau

SEQ ID NO: 7956 - RNA, 20 nt, Artificial Sequence
  targeting sequence with CTCN PAM
gagccucaauguccacauuu

SEQ ID NO: 7957 - RNA, 20 nt, Artificial Sequence
  targeting sequence with CTCN PAM
gagaggggcugugacuuguc

SEQ ID NO: 7958 - RNA, 20 nt, Artificial Sequence
  targeting sequence with CTCN PAM
auguccacauuuaugcagug

SEQ ID NO: 7959 - RNA, 20 nt, Artificial Sequence
  targeting sequence with CTCN PAM
ccacugcauaaauguggaca

SEQ ID NO: 7960 - RNA, 20 nt, Artificial Sequence
  targeting sequence with CTCN PAM
cucuugggcuuuuguggaga

SEQ ID NO: 7961 - RNA, 20 nt, Artificial Sequence
  targeting sequence with CTCN PAM
ugggcuuuuguggagaagaa

SEQ ID NO: 7962 - RNA, 20 nt, Artificial Sequence
  targeting sequence with CTCN PAM
guggaaccuugcugccugac

SEQ ID NO: 7963 - RNA, 20 nt, Artificial Sequence
  targeting sequence with CTCN PAM
cugugcuaguguggagggag

SEQ ID NO: 7964 - RNA, 20 nt, Artificial Sequence
  targeting sequence with CTCN PAM
acacuagcacagggagaugc

SEQ ID NO: 7965 - RNA, 20 nt, Artificial Sequence
  targeting sequence with CTCN PAM
cuccacacuagcacagggag

SEQ ID NO: 7966 - RNA, 20 nt, Artificial Sequence
  targeting sequence with CTCN PAM
ucccccaguaccuagcacag

SEQ ID NO: 7967 - RNA, 20 nt, Artificial Sequence
  targeting sequence with CTCN PAM
ggggaaugcaaauuaaaaca

SEQ ID NO: 7968 - RNA, 20 nt, Artificial Sequence
  targeting sequence with CTCN PAM
accuauuauuaucuuuauua

SEQ ID NO: 7969 - RNA, 20 nt, Artificial Sequence
  targeting sequence with CTCN PAM
acauucugccagcuccaccu

SEQ ID NO: 7970 - RNA, 20 nt, Artificial Sequence
  targeting sequence with CTCN PAM
guuccuccacauucugccag

SEQ ID NO: 7971 - RNA, 20 nt, Artificial Sequence
  targeting sequence with CTCN PAM
uucugacguugcugauguga

SEQ ID NO: 7972 - RNA, 20 nt, Artificial Sequence
  targeting sequence with CTCN PAM
cucacucauuuaacaacaau

SEQ ID NO: 7973 - RNA, 20 nt, Artificial Sequence
  targeting sequence with CTCN PAM
uaauuauacauuacaaaauc

SEQ ID NO: 7974 - RNA, 20 nt, Artificial Sequence
  targeting sequence with CTCN PAM
uucucuuaauuauacauuac

SEQ ID NO: 7975 - RNA, 20 nt, Artificial Sequence
  targeting sequence with CTCN PAM
cuuucucuuaauuauacauu

SEQ ID NO: 7976 - RNA, 20 nt, Artificial Sequence
  targeting sequence with CTCN PAM
uuccuugauuuuguuuguga

SEQ ID NO: 7977 - RNA, 20 nt, Artificial Sequence
  targeting sequence with CTCN PAM
caaacaaaaucaaggaagga

SEQ ID NO: 7978 - RNA, 20 nt, Artificial Sequence
  targeting sequence with CTCN PAM
cucacaaacaaaaucaagga

SEQ ID NO: 7979 - RNA, 20 nt, Artificial Sequence
  targeting sequence with CTCN PAM
gcugcuggaggugguccuga

SEQ ID NO: 7980 - RNA, 20 nt, Artificial Sequence
  targeting sequence with CTCN PAM
agcagcagagaaaaggauug

SEQ ID NO: 7981 - RNA, 20 nt, Artificial Sequence
  targeting sequence with CTCN PAM
ggaccaccuccagcagcaga

SEQ ID NO: 7982 - RNA, 20 nt, Artificial Sequence
  targeting sequence with CTCN PAM
aucucaggaccaccuccagc

SEQ ID NO: 7983 - RNA, 20 nt, Artificial Sequence
  targeting sequence with CTCN PAM
uuaggucuuacuggccagaa

SEQ ID NO: 7984 - RNA, 20 nt, Artificial Sequence
  targeting sequence with CTCN PAM
agccacuacaucuguuuuca

SEQ ID NO: 7985 - RNA, 20 nt, Artificial Sequence
  targeting sequence with CTCN PAM
ugacugcaagacagcugcug

SEQ ID NO: 7986 - RNA, 20 nt, Artificial Sequence
  targeting sequence with CTCN PAM
uggaauuucccucaugacug

SEQ ID NO: 7987 - RNA, 20 nt, Artificial Sequence
  targeting sequence with CTCN PAM
gugaaucucuuggaauuucc

SEQ ID NO: 7988 - RNA, 20 nt, Artificial Sequence
  targeting sequence with CTCN PAM
gcuuucugaaaauauguauu

SEQ ID NO: 7989 - RNA, 20 nt, Artificial Sequence
  targeting sequence with CTCN PAM
ucccacaacaaauccagguc

SEQ ID NO: 7990 - RNA, 20 nt, Artificial Sequence
  targeting sequence with CTCN PAM
aggucauuuucaugcagaug

SEQ ID NO: 7991 - RNA, 20 nt, Artificial Sequence
  targeting sequence with CTCN PAM
aauuuuccucaaggucauuu

SEQ ID NO: 7992 - RNA, 20 nt, Artificial Sequence
  targeting sequence with CTCN PAM
uccaauuuuccucaagguca

SEQ ID NO: 7993 - RNA, 20 nt, Artificial Sequence
  targeting sequence with CTCN PAM
ccuccaauuuuccucaaggu

SEQ ID NO: 7994 - RNA, 20 nt, Artificial Sequence
  targeting sequence with CTCN PAM
uggggaccucagugguuguu

SEQ ID NO: 7995 - RNA, 20 nt, Artificial Sequence
  targeting sequence with CTCN PAM
gugguuguugcugggcuggg

SEQ ID NO: 7996 - RNA, 20 nt, Artificial Sequence
  targeting sequence with CTCN PAM
aaaacccagcccagcaacaa

SEQ ID NO: 7997 - RNA, 20 nt, Artificial Sequence
  targeting sequence with CTCN PAM
cuggcugagauggcugacuu

SEQ ID NO: 7998 - RNA, 20 nt, Artificial Sequence
  targeting sequence with CTCN PAM
gccagggaggaaggucagau

SEQ ID NO: 7999 - RNA, 20 nt, Artificial Sequence
  targeting sequence with CTCN PAM
gcaccauuaacacccugacg

SEQ ID NO: 8000 - RNA, 20 nt, Artificial Sequence
  targeting sequence with CTCN PAM
ucaggguguuaauggugcag

SEQ ID NO: 8001 - RNA, 20 nt, Artificial Sequence
  targeting sequence with CTCN PAM
ucgucaggguguuaauggug

SEQ ID NO: 8002 - RNA, 20 nt, Artificial Sequence
  targeting sequence with CTCN PAM
ccccuaggccaaaauauuuc

SEQ ID NO: 8003 - RNA, 20 nt, Artificial Sequence
  targeting sequence with CTCN PAM
cgguccccaccuccacuugc

SEQ ID NO: 8004 - RNA, 20 nt, Artificial Sequence
  targeting sequence with CTCN PAM
acuugcccuggggcccgggc

SEQ ID NO: 8005 - RNA, 20 nt, Artificial Sequence
  targeting sequence with CTCN PAM
gagcacugaugcaaaucggg

SEQ ID NO: 8006 - RNA, 20 nt, Artificial Sequence
  targeting sequence with CTCN PAM
gagguccagggugaaaggaa

SEQ ID NO: 8007 - RNA, 20 nt, Artificial Sequence
  targeting sequence with CTCN PAM
acacaaauacccaacugggu

SEQ ID NO: 8008 - RNA, 20 nt, Artificial Sequence
  targeting sequence with CTCN PAM
uccacacaaauacccaacug

SEQ ID NO: 8009 - RNA, 20 nt, Artificial Sequence
  targeting sequence with CTCN PAM
gaucccguccuuccuccccc

SEQ ID NO: 8010 - RNA, 20 nt, Artificial Sequence
  targeting sequence with CTCN PAM
cccuccaugcuugccucaug

SEQ ID NO: 8011 - RNA, 20 nt, Artificial Sequence
  targeting sequence with CTCN PAM
augcuugccucaugucagga

SEQ ID NO: 8012 - RNA, 20 nt, Artificial Sequence
  targeting sequence with CTCN PAM
ugucaggacuuucuaaagca

SEQ ID NO: 8013 - RNA, 20 nt, Artificial Sequence
  targeting sequence with CTCN PAM
ucagugaggggagagugauu

SEQ ID NO: 8014 - RNA, 20 nt, Artificial Sequence
  targeting sequence with CTCN PAM
gugaggggagagugauugcc

SEQ ID NO: 8015 - RNA, 20 nt, Artificial Sequence
  targeting sequence with CTCN PAM
cugaggagaugcaaagucca

SEQ ID NO: 8016 - RNA, 20 nt, Artificial Sequence
  targeting sequence with CTCN PAM
ccucacugaggagaugcaaa

SEQ ID NO: 8017 - RNA, 20 nt, Artificial Sequence
  targeting sequence with CTCN PAM
ccccucacugaggagaugca

SEQ ID NO: 8018 - RNA, 20 nt, Artificial Sequence
  targeting sequence with CTCN PAM
ucagcagaacaguggcaauc

SEQ ID NO: 8019 - RNA, 20 nt, Artificial Sequence
  targeting sequence with CTCN PAM
guucacucaucagcagaaca

SEQ ID NO: 8020 - RNA, 20 nt, Artificial Sequence
  targeting sequence with CTCN PAM
gaaaggggcaaguuguugcc

SEQ ID NO: 8021 - RNA, 20 nt, Artificial Sequence
  targeting sequence with CTCN PAM
gcuacaaauucacgguguga

SEQ ID NO: 8022 - RNA, 20 nt, Artificial Sequence
  targeting sequence with CTCN PAM
uguucuggaucuccgccugg

SEQ ID NO: 8023 - RNA, 20 nt, Artificial Sequence
  targeting sequence with CTCN PAM
gccugggucgugucccaucu

SEQ ID NO: 8024 - RNA, 20 nt, Artificial Sequence
  targeting sequence with CTCN PAM
acaacauccccuucccccuu

SEQ ID NO: 8025 - RNA, 20 nt, Artificial Sequence
  targeting sequence with CTCN PAM
ucaugauagccacugucacc

SEQ ID NO: 8026 - RNA, 20 nt, Artificial Sequence
  targeting sequence with CTCN PAM
ugauagccacugucaccacc

SEQ ID NO: 8027 - RNA, 20 nt, Artificial Sequence
  targeting sequence with CTCN PAM
agccugugcucauuaucaca

SEQ ID NO: 8028 - RNA, 20 nt, Artificial Sequence
  targeting sequence with CTCN PAM
uuaucacauggccccucaca

SEQ ID NO: 8029 - RNA, 20 nt, Artificial Sequence
  targeting sequence with CTCN PAM
caggguacugucuccaggcu

SEQ ID NO: 8030 - RNA, 20 nt, Artificial Sequence
  targeting sequence with CTCN PAM
aggcuggaccccaccacacc

SEQ ID NO: 8031 - RNA, 20 nt, Artificial Sequence
  targeting sequence with CTCN PAM
ggugggugugguggggucca

SEQ ID NO: 8032 - RNA, 20 nt, Artificial Sequence
  targeting sequence with CTCN PAM
uaagugguaguugggcucua

SEQ ID NO: 8033 - RNA, 20 nt, Artificial Sequence
  targeting sequence with CTCN PAM
aaaaccacucucuccagacc

SEQ ID NO: 8034 - RNA, 20 nt, Artificial Sequence
  targeting sequence with CTCN PAM
cuccagaccaaagcgaauug

SEQ ID NO: 8035 - RNA, 20 nt, Artificial Sequence
  targeting sequence with CTCN PAM
ccagaccaaagcgaauugga

SEQ ID NO: 8036 - RNA, 20 nt, Artificial Sequence
  targeting sequence with CTCN PAM
agaccaaagcgaauuggacu

SEQ ID NO: 8037 - RNA, 20 nt, Artificial Sequence
  targeting sequence with CTCN PAM
uacagcugggacccccuuua

SEQ ID NO: 8038 - RNA, 20 nt, Artificial Sequence
  targeting sequence with CTCN PAM
ugguccagcagaagagauug

SEQ ID NO: 8039 - RNA, 20 nt, Artificial Sequence
  targeting sequence with CTCN PAM
ucugcuggaccaggagcucc

SEQ ID NO: 8040 - RNA, 20 nt, Artificial Sequence
  targeting sequence with CTCN PAM
augugacaaucucuucugcu

SEQ ID NO: 8041 - RNA, 20 nt, Artificial Sequence
  targeting sequence with CTCN PAM
cuuggcaaagagaagagggg

SEQ ID NO: 8042 - RNA, 20 nt, Artificial Sequence
  targeting sequence with CTCN PAM
uugccaagggaguccucuau

SEQ ID NO: 8043 - RNA, 20 nt, Artificial Sequence
  targeting sequence with CTCN PAM
ucucuuugccaagggagucc

SEQ ID NO: 8044 - RNA, 20 nt, Artificial Sequence
  targeting sequence with CTCN PAM
cugaacuuucugcccuaugu

SEQ ID NO: 8045 - RNA, 20 nt, Artificial Sequence
  targeting sequence with CTCN PAM
aggcagcacucccugaacuu

SEQ ID NO: 8046 - RNA, 20 nt, Artificial Sequence
  targeting sequence with CTCN PAM
uccaggcagcacucccugaa

SEQ ID NO: 8047 - RNA, 20 nt, Artificial Sequence
  targeting sequence with CTCN PAM
uccuccaggcagcacucccu

SEQ ID NO: 8048 - RNA, 20 nt, Artificial Sequence
  targeting sequence with CTCN PAM
ugacacccaccccaaggguc

SEQ ID NO: 8049 - RNA, 20 nt, Artificial Sequence
  targeting sequence with CTCN PAM
uggaaugcccuucccagcau

SEQ ID NO: 8050 - RNA, 20 nt, Artificial Sequence
  targeting sequence with CTCN PAM
ugcuaugccuuccuccugga

SEQ ID NO: 8051 - RNA, 20 nt, Artificial Sequence
  targeting sequence with CTCN PAM
gcagccauggcucaugcuau

SEQ ID NO: 8052 - RNA, 20 nt, Artificial Sequence
  targeting sequence with CTCN PAM
acucugcagccauggcucau

SEQ ID NO: 8053 - RNA, 20 nt, Artificial Sequence
  targeting sequence with CTCN PAM
agcaguccaggucacccagc

SEQ ID NO: 8054 - RNA, 20 nt, Artificial Sequence
  targeting sequence with CTCN PAM
cugaaaauguagcacugccu

SEQ ID NO: 8055 - RNA, 20 nt, Artificial Sequence
  targeting sequence with CTCN PAM
ugaggaguuuaugaaaugca

SEQ ID NO: 8056 - RNA, 20 nt, Artificial Sequence
  targeting sequence with CTCN PAM
ggagauaccaaagcagcccu

SEQ ID NO: 8057 - RNA, 20 nt, Artificial Sequence
  targeting sequence with CTCN PAM
ucaggagauaccaaagcagc

SEQ ID NO: 8058 - RNA, 20 nt, Artificial Sequence
  targeting sequence with CTCN PAM
aggaacugggcccaggaauc

SEQ ID NO: 8059 - RNA, 20 nt, Artificial Sequence
  targeting sequence with CTCN PAM
gccuggcccagaaucuccag

SEQ ID NO: 8060 - RNA, 20 nt, Artificial Sequence
  targeting sequence with CTCN PAM
aagcgggaggguaggaggag

SEQ ID NO: 8061 - RNA, 20 nt, Artificial Sequence
  targeting sequence with CTCN PAM
cgcuuugagaauugcagauu

SEQ ID NO: 8062 - RNA, 20 nt, Artificial Sequence
  targeting sequence with CTCN PAM
uacccucccgcuuugagaau

SEQ ID NO: 8063 - RNA, 20 nt, Artificial Sequence
  targeting sequence with CTCN PAM
uccuacccucccgcuuugag

SEQ ID NO: 8064 - RNA, 20 nt, Artificial Sequence
  targeting sequence with CTCN PAM
uuccaccacucugaugcagg

SEQ ID NO: 8065 - RNA, 20 nt, Artificial Sequence
  targeting sequence with CTCN PAM
gaugcagguggccccugggc

SEQ ID NO: 8066 - RNA, 20 nt, Artificial Sequence
  targeting sequence with CTCN PAM
aagcauggcccaggggccac

SEQ ID NO: 8067 - RNA, 20 nt, Artificial Sequence
  targeting sequence with CTCN PAM
guccugcuaguguuucucca

SEQ ID NO: 8068 - RNA, 20 nt, Artificial Sequence
  targeting sequence with CTCN PAM
guccaaggccaccucagucc

SEQ ID NO: 8069 - RNA, 20 nt, Artificial Sequence
  targeting sequence with CTCN PAM
acagugcucuguccaaggcc

SEQ ID NO: 8070 - RNA, 20 nt, Artificial Sequence
  targeting sequence with CTCN PAM
accccagaccccuccacagu

SEQ ID NO: 8071 - RNA, 20 nt, Artificial Sequence
  targeting sequence with CTCN PAM
gccuccaccccagaccccuc

SEQ ID NO: 8072 - RNA, 20 nt, Artificial Sequence
  targeting sequence with CTCN PAM
accucugccuccaccccaga

SEQ ID NO: 8073 - RNA, 20 nt, Artificial Sequence
  targeting sequence with CTCN PAM
uccuacagcgcacuccaccu

SEQ ID NO: 8074 - RNA, 20 nt, Artificial Sequence
  targeting sequence with CTCN PAM
uggacaagccuauugaaaag

SEQ ID NO: 8075 - RNA, 20 nt, Artificial Sequence
  targeting sequence with CTCN PAM
uuucaucauucucuagugcu

SEQ ID NO: 8076 - RNA, 20 nt, Artificial Sequence
  targeting sequence with CTCN PAM
agugcucuuaucaccaacuu

SEQ ID NO: 8077 - RNA, 20 nt, Artificial Sequence
  targeting sequence with CTCN PAM
uaucaccaacuuauaggcug

SEQ ID NO: 8078 - RNA, 20 nt, Artificial Sequence
  targeting sequence with CTCN PAM
acuaugagggcugcaugaga

SEQ ID NO: 8079 - RNA, 20 nt, Artificial Sequence
  targeting sequence with CTCN PAM
uaguugagugaaacagguaa

SEQ ID NO: 8080 - RNA, 20 nt, Artificial Sequence
  targeting sequence with CTCN PAM
ugcagcccucauaguugagu

SEQ ID NO: 8081 - RNA, 20 nt, Artificial Sequence
  targeting sequence with CTCN PAM
cuugaucaccuuccauguua

SEQ ID NO: 8082 - RNA, 20 nt, Artificial Sequence
  targeting sequence with CTCN PAM
aaaagaaaaaaaaugcaaac

SEQ ID NO: 8083 - RNA, 20 nt, Artificial Sequence
  targeting sequence with CTCN PAM
aucucaaaaagaaaaaaaau

SEQ ID NO: 8084 - RNA, 20 nt, Artificial Sequence
  targeting sequence with CTCN PAM
cucuugucacccaggaugaa

SEQ ID NO: 8085 - RNA, 20 nt, Artificial Sequence
  targeting sequence with CTCN PAM
ugucacccaggaugaagugc

SEQ ID NO: 8086 - RNA, 20 nt, Artificial Sequence
  targeting sequence with CTCN PAM
gcucaccacaaccuccgccu

SEQ ID NO: 8087 - RNA, 20 nt, Artificial Sequence
  targeting sequence with CTCN PAM
ccacaaccuccgccucccag

SEQ ID NO: 8088 - RNA, 20 nt, Artificial Sequence
  targeting sequence with CTCN PAM
gccucccagguucaagcgau

SEQ ID NO: 8089 - RNA, 20 nt, Artificial Sequence
  targeting sequence with CTCN PAM
cagguucaagcgauucucug

SEQ ID NO: 8090 - RNA, 20 nt, Artificial Sequence
  targeting sequence with CTCN PAM
gccucagccuaccgaguagc

SEQ ID NO: 8091 - RNA, 20 nt, Artificial Sequence
  targeting sequence with CTCN PAM
gccuaccgaguagcugggau

SEQ ID NO: 8092 - RNA, 20 nt, Artificial Sequence
  targeting sequence with CTCN PAM
guaggcugaggcagagaauc

SEQ ID NO: 8093 - RNA, 20 nt, Artificial Sequence
  targeting sequence with CTCN PAM
acuaaaaacacaaaauuagc

SEQ ID NO: 8094 - RNA, 20 nt, Artificial Sequence
  targeting sequence with CTCN PAM
auguuggucaggcuggucuu

SEQ ID NO: 8095 - RNA, 20 nt, Artificial Sequence
  targeting sequence with CTCN PAM
ugacuucaggugauccaccc

SEQ ID NO: 8096 - RNA, 20 nt, Artificial Sequence
  targeting sequence with CTCN PAM
gccucccaacguguuaggau

SEQ ID NO: 8097 - RNA, 20 nt, Artificial Sequence
  targeting sequence with CTCN PAM
caacguguuaggauuacagg

SEQ ID NO: 8098 - RNA, 20 nt, Artificial Sequence
  targeting sequence with CTCN PAM
caccuguaauccuaacacgu

SEQ ID NO: 8099 - RNA, 20 nt, Artificial Sequence
  targeting sequence with CTCN PAM
uccacccuaaaaaaacaaaa

SEQ ID NO: 8100 - RNA, 20 nt, Artificial Sequence
  targeting sequence with CTCN PAM
gaucucuuccacccuaaaaa

SEQ ID NO: 8101 - RNA, 20 nt, Artificial Sequence
  targeting sequence with CTCN PAM
gcacgcucagaucucuucca

SEQ ID NO: 8102 - RNA, 20 nt, Artificial Sequence
  targeting sequence with CTCN PAM
cagcacgcucagaucucuuc

SEQ ID NO: 8103 - RNA, 20 nt, Artificial Sequence
  targeting sequence with CTCN PAM
cccuuuuuccugccagccuc

SEQ ID NO: 8104 - RNA, 20 nt, Artificial Sequence
  targeting sequence with CTCN PAM
uuuguacacaucaaggcuua

SEQ ID NO: 8105 - RNA, 20 nt, Artificial Sequence
  targeting sequence with CTCN PAM
cuuuuguacacaucaaggcu

SEQ ID NO: 8106 - RNA, 20 nt, Artificial Sequence
  targeting sequence with CTCN PAM
gucucucuuuuguacacauc

SEQ ID NO: 8107 - RNA, 20 nt, Artificial Sequence
  targeting sequence with CTCN PAM
cugucucucuuuuguacaca

SEQ ID NO: 8108 - RNA, 20 nt, Artificial Sequence
  targeting sequence with CTCN PAM
cucugucucucuuuuguaca

SEQ ID NO: 8109 - RNA, 20 nt, Artificial Sequence
  targeting sequence with CTCN PAM
gacaugucugccuggcucuc

SEQ ID NO: 8110 - RNA, 20 nt, Artificial Sequence
  targeting sequence with CTCN PAM
ucccuuuaagccggcaggga

SEQ ID NO: 8111 - RNA, 20 nt, Artificial Sequence
  targeting sequence with CTCN PAM
cugccggcuuaaagggaaga

SEQ ID NO: 8112 - RNA, 20 nt, Artificial Sequence
  targeting sequence with CTCN PAM
acccuguauguccccacucc

SEQ ID NO: 8113 - RNA, 20 nt, Artificial Sequence
  targeting sequence with CTCN PAM
ccacccuguauguccccacu

SEQ ID NO: 8114 - RNA, 20 nt, Artificial Sequence
  targeting sequence with CTCN PAM
uuuucuccaugaaguggcag

SEQ ID NO: 8115 - RNA, 20 nt, Artificial Sequence
  targeting sequence with CTCN PAM
augaaguggcagacaagggg

SEQ ID NO: 8116 - RNA, 20 nt, Artificial Sequence
  targeting sequence with CTCN PAM
ucccaggaagccccuugucu

SEQ ID NO: 8117 - RNA, 20 nt, Artificial Sequence
  targeting sequence with CTCN PAM
cuucccaggaagccccuugu

SEQ ID NO: 8118 - RNA, 20 nt, Artificial Sequence
  targeting sequence with CTCN PAM
ccucucuucccaggaagccc

SEQ ID NO: 8119 - RNA, 20 nt, Artificial Sequence
  targeting sequence with CTCN PAM
uccccucucuucccaggaag

SEQ ID NO: 8120 - RNA, 20 nt, Artificial Sequence
  targeting sequence with CTCN PAM
ccuccccucucuucccagga

SEQ ID NO: 8121 - RNA, 20 nt, Artificial Sequence
  targeting sequence with CTCN PAM
ucuccuccccucucuuccca

SEQ ID NO: 8122 - RNA, 20 nt, Artificial Sequence
  targeting sequence with CTCN PAM
ccucuccuccccucucuucc

SEQ ID NO: 8123 - RNA, 20 nt, Artificial Sequence
  targeting sequence with CTCN PAM
acccucuccucuccuccccu

SEQ ID NO: 8124 - RNA, 20 nt, Artificial Sequence
  targeting sequence with CTCN PAM
gggcccaaugcacaucacca

SEQ ID NO: 8125 - RNA, 20 nt, Artificial Sequence
  targeting sequence with CTCN PAM
agaauggcucugggcccaau

SEQ ID NO: 8126 - RNA, 20 nt, Artificial Sequence
  targeting sequence with CTCN PAM
accugcucaagaauggcucu

SEQ ID NO: 8127 - RNA, 20 nt, Artificial Sequence
  targeting sequence with CTCN PAM
ccaccugcucaagaauggcu

SEQ ID NO: 8128 - RNA, 20 nt, Artificial Sequence
  targeting sequence with CTCN PAM
aaaaugcuuuccucuccacc

SEQ ID NO: 8129 - RNA, 20 nt, Artificial Sequence
  targeting sequence with CTCN PAM
uuuguucagaaucucccaga

SEQ ID NO: 8130 - RNA, 20 nt, Artificial Sequence
  targeting sequence with CTCN PAM
cagaguccccuaaccucagg

SEQ ID NO: 8131 - RNA, 20 nt, Artificial Sequence
  targeting sequence with CTCN PAM
gggagauucugaacaaaaga

SEQ ID NO: 8132 - RNA, 20 nt, Artificial Sequence
  targeting sequence with CTCN PAM
ggagagggccaugccuuggc

SEQ ID NO: 8133 - RNA, 20 nt, Artificial Sequence
  targeting sequence with CTCN PAM
ugagguuaggggacucuggg

SEQ ID NO: 8134 - RNA, 20 nt, Artificial Sequence
  targeting sequence with CTCN PAM
ccugagguuaggggacucug

SEQ ID NO: 8135 - RNA, 20 nt, Artificial Sequence
  targeting sequence with CTCN PAM
agaggcguuaaaaaccagcc

SEQ ID NO: 8136 - RNA, 20 nt, Artificial Sequence
  targeting sequence with CTCN PAM
aggccaaggcauggcccucu

SEQ ID NO: 8137 - RNA, 20 nt, Artificial Sequence
  targeting sequence with CTCN PAM
cgaggccaaggcauggcccu

SEQ ID NO: 8138 - RNA, 20 nt, Artificial Sequence
  targeting sequence with CTCN PAM
caucucagugucuccagcug

SEQ ID NO: 8139 - RNA, 20 nt, Artificial Sequence
  targeting sequence with CTCN PAM
gugucuccagcugggccaug

SEQ ID NO: 8140 - RNA, 20 nt, Artificial Sequence
  targeting sequence with CTCN PAM
agcugggccaugcacugcuu

SEQ ID NO: 8141 - RNA, 20 nt, Artificial Sequence
  targeting sequence with CTCN PAM
ggaucugugguccaguuaua

SEQ ID NO: 8142 - RNA, 20 nt, Artificial Sequence
  targeting sequence with CTCN PAM
aggaagccggcccggauuca

SEQ ID NO: 8143 - RNA, 20 nt, Artificial Sequence
  targeting sequence with CTCN PAM
gucagaugggcacugaaucc

SEQ ID NO: 8144 - RNA, 20 nt, Artificial Sequence
  targeting sequence with CTCN PAM
cagaagggacaggcuaggug

SEQ ID NO: 8145 - RNA, 20 nt, Artificial Sequence
  targeting sequence with CTCN PAM
ucuugccuccuaucacaguc

SEQ ID NO: 8146 - RNA, 20 nt, Artificial Sequence
  targeting sequence with CTCN PAM
ugccuccuaucacagucgcc

SEQ ID NO: 8147 - RNA, 20 nt, Artificial Sequence
  targeting sequence with CTCN PAM
uaucacagucgccugugcuc

SEQ ID NO: 8148 - RNA, 20 nt, Artificial Sequence
  targeting sequence with CTCN PAM
caucugccucccuguggacu

SEQ ID NO: 8149 - RNA, 20 nt, Artificial Sequence
  targeting sequence with CTCN PAM
ucugccucccuguggacucu

SEQ ID NO: 8150 - RNA, 20 nt, Artificial Sequence
  targeting sequence with CTCN PAM
cuguggacucugaggaugag

SEQ ID NO: 8151 - RNA, 20 nt, Artificial Sequence
  targeting sequence with CTCN PAM
gaggaugaggcgagggcuga

SEQ ID NO: 8152 - RNA, 20 nt, Artificial Sequence
  targeting sequence with CTCN PAM
gaguccacagggaggcagau

SEQ ID NO: 8153 - RNA, 20 nt, Artificial Sequence
  targeting sequence with CTCN PAM
uccucagaguccacagggag

SEQ ID NO: 8154 - RNA, 20 nt, Artificial Sequence
  targeting sequence with CTCN PAM
ccucauccucagaguccaca

SEQ ID NO: 8155 - RNA, 20 nt, Artificial Sequence
  targeting sequence with CTCN PAM
ggggugagagcaggugccag

SEQ ID NO: 8156 - RNA, 20 nt, Artificial Sequence
  targeting sequence with CTCN PAM
ccccugagcugaaucagccc

SEQ ID NO: 8157 - RNA, 20 nt, Artificial Sequence
  targeting sequence with CTCN PAM
caccccugagcugaaucagc

SEQ ID NO: 8158 - RNA, 20 nt, Artificial Sequence
  targeting sequence with CTCN PAM
gaugacagguaccuggcgcc

SEQ ID NO: 8159 - RNA, 20 nt, Artificial Sequence
  targeting sequence with CTCN PAM
gcuggucuagcugggcaagg

SEQ ID NO: 8160 - RNA, 20 nt, Artificial Sequence
  targeting sequence with CTCN PAM
agaguggccggaagcuuccu

SEQ ID NO: 8161 - RNA, 20 nt, Artificial Sequence
  targeting sequence with CTCN PAM
ggagcagcagccuugcccag

SEQ ID NO: 8162 - RNA, 20 nt, Artificial Sequence
  targeting sequence with CTCN PAM
caggaagcuuccggccacuc

SEQ ID NO: 8163 - RNA, 20 nt, Artificial Sequence
  targeting sequence with CTCN PAM
cccaggaagcuuccggccac

SEQ ID NO: 8164 - RNA, 20 nt, Artificial Sequence
  targeting sequence with CTCN PAM
gggccugucccucucucccu

SEQ ID NO: 8165 - RNA, 20 nt, Artificial Sequence
  targeting sequence with CTCN PAM
cucccuauuccuuccuuccu

SEQ ID NO: 8166 - RNA, 20 nt, Artificial Sequence
  targeting sequence with CTCN PAM
cccuauuccuuccuuccucc

SEQ ID NO: 8167 - RNA, 20 nt, Artificial Sequence
  targeting sequence with CTCN PAM
cuauuccuuccuuccucccu

SEQ ID NO: 8168 - RNA, 20 nt, Artificial Sequence
  targeting sequence with CTCN PAM
cuuccugaaacugcguccuc

SEQ ID NO: 8169 - RNA, 20 nt, Artificial Sequence
  targeting sequence with CTCN PAM
aaauccugcuccagcaccag

SEQ ID NO: 8170 - RNA, 20 nt, Artificial Sequence
  targeting sequence with CTCN PAM
agcaccagcaacccccugcu

SEQ ID NO: 8171 - RNA, 20 nt, Artificial Sequence
  targeting sequence with CTCN PAM
ggcagcguuucggucccuuu

SEQ ID NO: 8172 - RNA, 20 nt, Artificial Sequence
  targeting sequence with CTCN PAM
ggcggggggaaaggacugca

SEQ ID NO: 8173 - RNA, 20 nt, Artificial Sequence
  targeting sequence with CTCN PAM
caggcggggggaaaggacug

SEQ ID NO: 8174 - RNA, 20 nt, Artificial Sequence
  targeting sequence with CTCN PAM
uugcucucagugccccacuc

SEQ ID NO: 8175 - RNA, 20 nt, Artificial Sequence
  targeting sequence with CTCN PAM
cagugccccacucucuggau

SEQ ID NO: 8176 - RNA, 20 nt, Artificial Sequence
  targeting sequence with CTCN PAM
gugccccacucucuggauca

SEQ ID NO: 8177 - RNA, 20 nt, Artificial Sequence
  targeting sequence with CTCN PAM
cuggaucauuguccuucucu

SEQ ID NO: 8178 - RNA, 20 nt, Artificial Sequence
  targeting sequence with CTCN PAM
ggaucauuguccuucucucc

SEQ ID NO: 8179 - RNA, 20 nt, Artificial Sequence
  targeting sequence with CTCN PAM
ccuccauaaacgcagucaug

SEQ ID NO: 8180 - RNA, 20 nt, Artificial Sequence
  targeting sequence with CTCN PAM
uccauaaacgcagucaugcg

SEQ ID NO: 8181 - RNA, 20 nt, Artificial Sequence
  targeting sequence with CTCN PAM
auaaacgcagucaugcgcca

SEQ ID NO: 8182 - RNA, 20 nt, Artificial Sequence
  targeting sequence with CTCN PAM
guuguaaucuuauggaacca

SEQ ID NO: 8183 - RNA, 20 nt, Artificial Sequence
  targeting sequence with CTCN PAM
gcucuguuguaaucuuaugg

SEQ ID NO: 8184 - RNA, 20 nt, Artificial Sequence
  targeting sequence with CTCN PAM
ugucaccucgcuuagagacg

SEQ ID NO: 8185 - RNA, 20 nt, Artificial Sequence
  targeting sequence with CTCN PAM
cuuagagacgucauagcugu

SEQ ID NO: 8186 - RNA, 20 nt, Artificial Sequence
  targeting sequence with CTCN PAM
aagcgaggugacaggaguuu

SEQ ID NO: 8187 - RNA, 20 nt, Artificial Sequence
  targeting sequence with CTCN PAM
gagcccaagccaagccaucg

SEQ ID NO: 8188 - RNA, 20 nt, Artificial Sequence
  targeting sequence with CTCN PAM
gaggccugacagcuaugacg

SEQ ID NO: 8189 - RNA, 20 nt, Artificial Sequence
  targeting sequence with CTCN PAM
aaaagcaccuccacugagca

SEQ ID NO: 8190 - RNA, 20 nt, Artificial Sequence
  targeting sequence with CTCN PAM
acugagcaccuugcgacccc

SEQ ID NO: 8191 - RNA, 20 nt, Artificial Sequence
  targeting sequence with CTCN PAM
guggaggugcuuuuugagcc

SEQ ID NO: 8192 - RNA, 20 nt, Artificial Sequence
  targeting sequence with CTCN PAM
uacccgccagagaacaaacc

SEQ ID NO: 8193 - RNA, 20 nt, Artificial Sequence
  targeting sequence with CTCN PAM
ggcggguaggaguggggguc

SEQ ID NO: 8194 - RNA, 20 nt, Artificial Sequence
  targeting sequence with CTCN PAM
cuucgcugacucucuuuuug

SEQ ID NO: 8195 - RNA, 20 nt, Artificial Sequence
  targeting sequence with CTCN PAM
cuuuuuggacucagcccgcc

SEQ ID NO: 8196 - RNA, 20 nt, Artificial Sequence
  targeting sequence with CTCN PAM
uuuuggacucagcccgccug

SEQ ID NO: 8197 - RNA, 20 nt, Artificial Sequence
  targeting sequence with CTCN PAM
gcccgccugcacccagguga

SEQ ID NO: 8198 - RNA, 20 nt, Artificial Sequence
  targeting sequence with CTCN PAM
cacaaagccuguuugguggu

SEQ ID NO: 8199 - RNA, 20 nt, Artificial Sequence
  targeting sequence with CTCN PAM
ucacacggaugcacauguaa

SEQ ID NO: 8200 - RNA, 20 nt, Artificial Sequence
  targeting sequence with CTCN PAM
gaucgggggaccucccuugg

SEQ ID NO: 8201 - RNA, 20 nt, Artificial Sequence
  targeting sequence with CTCN PAM
cuugggagaucaauccccug

SEQ ID NO: 8202 - RNA, 20 nt, Artificial Sequence
  targeting sequence with CTCN PAM
caagggaggucccccgaucc

SEQ ID NO: 8203 - RNA, 20 nt, Artificial Sequence
  targeting sequence with CTCN PAM
ugcucuuugcuccaugagaa

SEQ ID NO: 8204 - RNA, 20 nt, Artificial Sequence
  targeting sequence with CTCN PAM
uugcuccaugagaaagaucc

SEQ ID NO: 8205 - RNA, 20 nt, Artificial Sequence
  targeting sequence with CTCN PAM
augagaaagauccaccuacg

SEQ ID NO: 8206 - RNA, 20 nt, Artificial Sequence
  targeting sequence with CTCN PAM
uggagcaaagagcaggagga

SEQ ID NO: 8207 - RNA, 20 nt, Artificial Sequence
  targeting sequence with CTCN PAM
gguccucagaccgaccagcc

SEQ ID NO: 8208 - RNA, 20 nt, Artificial Sequence
  targeting sequence with CTCN PAM
gaccgaccagcccaagaaac

SEQ ID NO: 8209 - RNA, 20 nt, Artificial Sequence
  targeting sequence with CTCN PAM
ccaauuucaaguccgguaag

SEQ ID NO: 8210 - RNA, 20 nt, Artificial Sequence
  targeting sequence with CTCN PAM
uuuuacucucuucuccaacc

SEQ ID NO: 8211 - RNA, 20 nt, Artificial Sequence
  targeting sequence with CTCN PAM
cuucuccaaccucccucacu

SEQ ID NO: 8212 - RNA, 20 nt, Artificial Sequence
  targeting sequence with CTCN PAM
ucuccaaccucccucacuau

SEQ ID NO: 8213 - RNA, 20 nt, Artificial Sequence
  targeting sequence with CTCN PAM
aaccucccucacuaucccuc

SEQ ID NO: 8214 - RNA, 20 nt, Artificial Sequence
  targeting sequence with CTCN PAM
cucacuaucccucaaccucu

SEQ ID NO: 8215 - RNA, 20 nt, Artificial Sequence
  targeting sequence with CTCN PAM
cuaucccucaaccucuuucu

SEQ ID NO: 8216 - RNA, 20 nt, Artificial Sequence
  targeting sequence with CTCN PAM
accucuuucuccuuucaauc

SEQ ID NO: 8217 - RNA, 20 nt, Artificial Sequence
  targeting sequence with CTCN PAM
uucuccuuucaaucuuggcg

SEQ ID NO: 8218 - RNA, 20 nt, Artificial Sequence
  targeting sequence with CTCN PAM
uuucaaucuuggcgccacac

SEQ ID NO: 8219 - RNA, 20 nt, Artificial Sequence
  targeting sequence with CTCN PAM
cccuucucuuaauuucaauu

SEQ ID NO: 8220 - RNA, 20 nt, Artificial Sequence
  targeting sequence with CTCN PAM
cuucucuuaauuucaauuuc

SEQ ID NO: 8221 - RNA, 20 nt, Artificial Sequence
  targeting sequence with CTCN PAM
uaauuucaauuucuuucauu

SEQ ID NO: 8222 - RNA, 20 nt, Artificial Sequence
  targeting sequence with CTCN PAM
accaaaaaaugaaagaaauu

SEQ ID NO: 8223 - RNA, 20 nt, Artificial Sequence
  targeting sequence with CTCN PAM
uuugucucuaccaaaaaaug

SEQ ID NO: 8224 - RNA, 20 nt, Artificial Sequence
  targeting sequence with CTCN PAM
cugauuauccacucacguuu

SEQ ID NO: 8225 - RNA, 20 nt, Artificial Sequence
  targeting sequence with CTCN PAM
gauuauccacucacguuuca

SEQ ID NO: 8226 - RNA, 20 nt, Artificial Sequence
  targeting sequence with CTCN PAM
cguuucaagggugucagacc

SEQ ID NO: 8227 - RNA, 20 nt, Artificial Sequence
  targeting sequence with CTCN PAM
uaucucugugccccaauccc

SEQ ID NO: 8228 - RNA, 20 nt, Artificial Sequence
  targeting sequence with CTCN PAM
gugccccaaucccuuauuuc

SEQ ID NO: 8229 - RNA, 20 nt, Artificial Sequence
  targeting sequence with CTCN PAM
uaucucugugccccaauccc

SEQ ID NO: 8230 - RNA, 20 nt, Artificial Sequence
  targeting sequence with CTCN PAM
gugccccaaucccuuauuuc

SEQ ID NO: 8231 - RNA, 20 nt, Artificial Sequence
  targeting sequence with CTCN PAM
cugcuuuucuggagggcaag

SEQ ID NO: 8232 - RNA, 20 nt, Artificial Sequence
  targeting sequence with CTCN PAM
gcuuuucuggagggcaagaa

SEQ ID NO: 8233 - RNA, 20 nt, Artificial Sequence
  targeting sequence with CTCN PAM
agaaaagcagagaggggguu

SEQ ID NO: 8234 - RNA, 20 nt, Artificial Sequence
  targeting sequence with CTCN PAM
ccuccuccgugucucuacgc

SEQ ID NO: 8235 - RNA, 20 nt, Artificial Sequence
  targeting sequence with CTCN PAM
uccgugucucuacgcucucu

SEQ ID NO: 8236 - RNA, 20 nt, Artificial Sequence
  targeting sequence with CTCN PAM
gugucucuacgcucucuuuu

SEQ ID NO: 8237 - RNA, 20 nt, Artificial Sequence
  targeting sequence with CTCN PAM
acgcucucuuuucucagggu

SEQ ID NO: 8238 - RNA, 20 nt, Artificial Sequence
  targeting sequence with CTCN PAM
cuuuucucaggguuugccuc

SEQ ID NO: 8239 - RNA, 20 nt, Artificial Sequence
  targeting sequence with CTCN PAM
uuucucaggguuugccuccu

SEQ ID NO: 8240 - RNA, 20 nt, Artificial Sequence
  targeting sequence with CTCN PAM
ggguuugccuccuucacuau

SEQ ID NO: 8241 - RNA, 20 nt, Artificial Sequence
  targeting sequence with CTCN PAM
uucacuaugggcaaccuucc

SEQ ID NO: 8242 - RNA, 20 nt, Artificial Sequence
  targeting sequence with CTCN PAM
auuccuccuucuucuccuuu

SEQ ID NO: 8243 - RNA, 20 nt, Artificial Sequence
  targeting sequence with CTCN PAM
uucuucuccuuuagccugug

SEQ ID NO: 8244 - RNA, 20 nt, Artificial Sequence
  targeting sequence with CTCN PAM
uuuagccuguguccuuaaga

SEQ ID NO: 8245 - RNA, 20 nt, Artificial Sequence
  targeting sequence with CTCN PAM
ucaacucacaccugaccuaa

SEQ ID NO: 8246 - RNA, 20 nt, Artificial Sequence
  targeting sequence with CTCN PAM
caccugaccuaaaaccuaaa

SEQ ID NO: 8247 - RNA, 20 nt, Artificial Sequence
  targeting sequence with CTCN PAM
gaccauuugcccauuuuucg

SEQ ID NO: 8248 - RNA, 20 nt, Artificial Sequence
  targeting sequence with CTCN PAM
cuagccucuguucccaaugc

SEQ ID NO: 8249 - RNA, 20 nt, Artificial Sequence
  targeting sequence with CTCN PAM
guucccaaugcaauuccucc

SEQ ID NO: 8250 - RNA, 20 nt, Artificial Sequence
  targeting sequence with CTCN PAM
cagauccuccuucuuucccu

SEQ ID NO: 8251 - RNA, 20 nt, Artificial Sequence
  targeting sequence with CTCN PAM
uucuuucccucccgccuguc

SEQ ID NO: 8252 - RNA, 20 nt, Artificial Sequence
  targeting sequence with CTCN PAM
cgccuguccccucaguccca

SEQ ID NO: 8253 - RNA, 20 nt, Artificial Sequence
  targeting sequence with CTCN PAM
gucccaaccccaagcgucgc

SEQ ID NO: 8254 - RNA, 20 nt, Artificial Sequence
  targeting sequence with CTCN PAM
gcgacgcuugggguugggac

SEQ ID NO: 8255 - RNA, 20 nt, Artificial Sequence
  targeting sequence with CTCN PAM
uccccaggcugcucaucacc

SEQ ID NO: 8256 - RNA, 20 nt, Artificial Sequence
  targeting sequence with CTCN PAM
ccaggcugcucaucaccagg

SEQ ID NO: 8257 - RNA, 20 nt, Artificial Sequence
  targeting sequence with CTCN PAM
ucaccaggccgagcuaaguc

SEQ ID NO: 8258 - RNA, 20 nt, Artificial Sequence
  targeting sequence with CTCN PAM
gccuggugaugagcagccug

SEQ ID NO: 8259 - RNA, 20 nt, Artificial Sequence
  targeting sequence with CTCN PAM
gccuccgcuccuccacccua

SEQ ID NO: 8260 - RNA, 20 nt, Artificial Sequence
  targeting sequence with CTCN PAM
gcuccuccacccuauaaucc

SEQ ID NO: 8261 - RNA, 20 nt, Artificial Sequence
  targeting sequence with CTCN PAM
uccacccuauaauccuuuua

SEQ ID NO: 8262 - RNA, 20 nt, Artificial Sequence
  targeting sequence with CTCN PAM
acccuauaauccuuuuauca

SEQ ID NO: 8263 - RNA, 20 nt, Artificial Sequence
  targeting sequence with CTCN PAM
ccuccucacacccgauccgg

SEQ ID NO: 8264 - RNA, 20 nt, Artificial Sequence
  targeting sequence with CTCN PAM
ucacacccgauccggcucac

SEQ ID NO: 8265 - RNA, 20 nt, Artificial Sequence
  targeting sequence with CTCN PAM
cacccgauccggcucacagu

SEQ ID NO: 8266 - RNA, 20 nt, Artificial Sequence
  targeting sequence with CTCN PAM
caguuucguuccgugacugg

SEQ ID NO: 8267 - RNA, 20 nt, Artificial Sequence
  targeting sequence with CTCN PAM
cccaccugcccagcaauuua

SEQ ID NO: 8268 - RNA, 20 nt, Artificial Sequence
  targeting sequence with CTCN PAM
uaaaaagguggauggagcca

SEQ ID NO: 8269 - RNA, 20 nt, Artificial Sequence
  targeting sequence with CTCN PAM
auccaccuuuuuaagaguaa

SEQ ID NO: 8270 - RNA, 20 nt, Artificial Sequence
  targeting sequence with CTCN PAM
uuuuucuuuaucccaaauca

SEQ ID NO: 8271 - RNA, 20 nt, Artificial Sequence
  targeting sequence with CTCN PAM
uuuucaucaaauauaaaaau

SEQ ID NO: 8272 - RNA, 20 nt, Artificial Sequence
  targeting sequence with CTCN PAM
uuuggcagcaacccugagac

SEQ ID NO: 8273 - RNA, 20 nt, Artificial Sequence
  targeting sequence with CTCN PAM
ggguugcugccaaacgaguc

SEQ ID NO: 8274 - RNA, 20 nt, Artificial Sequence
  targeting sequence with CTCN PAM
auacucauuuuauuacccaa

SEQ ID NO: 8275 - RNA, 20 nt, Artificial Sequence
  targeting sequence with CTCN PAM
uuuuauuacccaauccacuc

SEQ ID NO: 8276 - RNA, 20 nt, Artificial Sequence
  targeting sequence with CTCN PAM
ugacauuaaauaaaacucca

SEQ ID NO: 8277 - RNA, 20 nt, Artificial Sequence
  targeting sequence with CTCN PAM
aaaaauuaaauuccagcccu

SEQ ID NO: 8278 - RNA, 20 nt, Artificial Sequence
  targeting sequence with CTCN PAM
aaccucacaacaggauuuaa

SEQ ID NO: 8279 - RNA, 20 nt, Artificial Sequence
  targeting sequence with CTCN PAM
caacaggauuuaauuaaccu

SEQ ID NO: 8280 - RNA, 20 nt, Artificial Sequence
  targeting sequence with CTCN PAM
ccuucaaggugugcaauaau

SEQ ID NO: 8281 - RNA, 20 nt, Artificial Sequence
  targeting sequence with CTCN PAM
acugugagacaaaccccagc

SEQ ID NO: 8282 - RNA, 20 nt, Artificial Sequence
  targeting sequence with CTCN PAM
caguggaggcaaggaauugc

SEQ ID NO: 8283 - RNA, 20 nt, Artificial Sequence
  targeting sequence with CTCN PAM
agcacacaagaacuuccaaa

SEQ ID NO: 8284 - RNA, 20 nt, Artificial Sequence
  targeting sequence with CTCN PAM
agaaccuccucccccaggag

SEQ ID NO: 8285 - RNA, 20 nt, Artificial Sequence
  targeting sequence with CTCN PAM
ucccccaggaguuugcuaca

SEQ ID NO: 8286 - RNA, 20 nt, Artificial Sequence
  targeting sequence with CTCN PAM
cccaggaguuugcuacaagu

SEQ ID NO: 8287 - RNA, 20 nt, Artificial Sequence
  targeting sequence with CTCN PAM
ugggggaggagguucuggag

SEQ ID NO: 8288 - RNA, 20 nt, Artificial Sequence
  targeting sequence with CTCN PAM
uaagccgcgucccaucugug

SEQ ID NO: 8289 - RNA, 20 nt, Artificial Sequence
  targeting sequence with CTCN PAM
ccuggcagccacucccagag

SEQ ID NO: 8290 - RNA, 20 nt, Artificial Sequence
  targeting sequence with CTCN PAM
cagagccccuggaacucugg

SEQ ID NO: 8291 - RNA, 20 nt, Artificial Sequence
  targeting sequence with CTCN PAM
gggaguggcugccaggugag

SEQ ID NO: 8292 - RNA, 20 nt, Artificial Sequence
  targeting sequence with CTCN PAM
ggcccaaggcucucugacug

SEQ ID NO: 8293 - RNA, 20 nt, Artificial Sequence
  targeting sequence with CTCN PAM
cugacugacuccuucccaga

SEQ ID NO: 8294 - RNA, 20 nt, Artificial Sequence
  targeting sequence with CTCN PAM
gacugacuccuucccagauc

SEQ ID NO: 8295 - RNA, 20 nt, Artificial Sequence
  targeting sequence with CTCN PAM
uucccagaucuucucggcuu

SEQ ID NO: 8296 - RNA, 20 nt, Artificial Sequence
  targeting sequence with CTCN PAM
gcuuagcggcugaagacuga

SEQ ID NO: 8297 - RNA, 20 nt, Artificial Sequence
  targeting sequence with CTCN PAM
gaagcccccagaccaucacg

SEQ ID NO: 8298 - RNA, 20 nt, Artificial Sequence
  targeting sequence with CTCN PAM
gcguccgugauggucugggg

SEQ ID NO: 8299 - RNA, 20 nt, Artificial Sequence
  targeting sequence with CTCN PAM
cacaguggaagguaagcccg

SEQ ID NO: 8300 - RNA, 20 nt, Artificial Sequence
  targeting sequence with CTCN PAM
caguggaagguaagcccguc

SEQ ID NO: 8301 - RNA, 20 nt, Artificial Sequence
  targeting sequence with CTCN PAM
guauugauuaagaaggggac

SEQ ID NO: 8302 - RNA, 20 nt, Artificial Sequence
  targeting sequence with CTCN PAM
cuccacauuaccuucuuuuc

SEQ ID NO: 8303 - RNA, 20 nt, Artificial Sequence
  targeting sequence with CTCN PAM
acauuaccuucuuuucaagg

SEQ ID NO: 8304 - RNA, 20 nt, Artificial Sequence
  targeting sequence with CTCN PAM
auaacuguuguggguauuga

SEQ ID NO: 8305 - RNA, 20 nt, Artificial Sequence
  targeting sequence with CTCN PAM
uaaaacuccccaacucuggu

SEQ ID NO: 8306 - RNA, 20 nt, Artificial Sequence
  targeting sequence with CTCN PAM
ccaacucuggugccaacuua

SEQ ID NO: 8307 - RNA, 20 nt, Artificial Sequence
  targeting sequence with CTCN PAM
ggugccaacuuagacaauac

SEQ ID NO: 8308 - RNA, 20 nt, Artificial Sequence
  targeting sequence with CTCN PAM
uuuaagcacuccuuuuuagu

SEQ ID NO: 8309 - RNA, 20 nt, Artificial Sequence
  targeting sequence with CTCN PAM
uuuuuaguuauccccaccug

SEQ ID NO: 8310 - RNA, 20 nt, Artificial Sequence
  targeting sequence with CTCN PAM
gccuaauaagggaacugggc

SEQ ID NO: 8311 - RNA, 20 nt, Artificial Sequence
  targeting sequence with CTCN PAM
uugccgcccuucuucccaau

SEQ ID NO: 8312 - RNA, 20 nt, Artificial Sequence
  targeting sequence with CTCN PAM
uuuguguccuccucuuguac

SEQ ID NO: 8313 - RNA, 20 nt, Artificial Sequence
  targeting sequence with CTCN PAM
ucuuguaccccccaccuuaa

SEQ ID NO: 8314 - RNA, 20 nt, Artificial Sequence
  targeting sequence with CTCN PAM
uguaccccccaccuuaaccc

SEQ ID NO: 8315 - RNA, 20 nt, Artificial Sequence
  targeting sequence with CTCN PAM
acucccuccuugguggccaa

SEQ ID NO: 8316 - RNA, 20 nt, Artificial Sequence
  targeting sequence with CTCN PAM
cuccuugguggccaaucaug

SEQ ID NO: 8317 - RNA, 20 nt, Artificial Sequence
  targeting sequence with CTCN PAM
uugguggccaaucaugcacc

SEQ ID NO: 8318 - RNA, 20 nt, Artificial Sequence
  targeting sequence with CTCN PAM
uuaaaaccuaaucacccuua

SEQ ID NO: 8319 - RNA, 20 nt, Artificial Sequence
  targeting sequence with CTCN PAM
augccaauaucccaucccgc

SEQ ID NO: 8320 - RNA, 20 nt, Artificial Sequence
  targeting sequence with CTCN PAM
ccuuacaauucccccauuuu

SEQ ID NO: 8321 - RNA, 20 nt, Artificial Sequence
  targeting sequence with CTCN PAM
uuacaauucccccauuuuac

SEQ ID NO: 8322 - RNA, 20 nt, Artificial Sequence
  targeting sequence with CTCN PAM
ccuauccucaauaccugccu

SEQ ID NO: 8323 - RNA, 20 nt, Artificial Sequence
  targeting sequence with CTCN PAM
uauccucaauaccugccucu

SEQ ID NO: 8324 - RNA, 20 nt, Artificial Sequence
  targeting sequence with CTCN PAM
auaccugccucuauaaccca

SEQ ID NO: 8325 - RNA, 20 nt, Artificial Sequence
  targeting sequence with CTCN PAM
auaacccauuauucuguucu

SEQ ID NO: 8326 - RNA, 20 nt, Artificial Sequence
  targeting sequence with CTCN PAM
aacaugcuuucuuuacuauu

SEQ ID NO: 8327 - RNA, 20 nt, Artificial Sequence
  targeting sequence with CTCN PAM
cuucacuuucacuuugacug

SEQ ID NO: 8328 - RNA, 20 nt, Artificial Sequence
  targeting sequence with CTCN PAM
ucacuuucacuuugacugac

SEQ ID NO: 8329 - RNA, 20 nt, Artificial Sequence
  targeting sequence with CTCN PAM
gcacauuaccuaggcuguac

SEQ ID NO: 8330 - RNA, 20 nt, Artificial Sequence
  targeting sequence with CTCN PAM
ucuguuaccuaucuuggcgu

SEQ ID NO: 8331 - RNA, 20 nt, Artificial Sequence
  targeting sequence with CTCN PAM
uaaaaacacaugugcucucc

SEQ ID NO: 8332 - RNA, 20 nt, Artificial Sequence
  targeting sequence with CTCN PAM
cccugccaaucguguccgac

SEQ ID NO: 8333 - RNA, 20 nt, Artificial Sequence
  targeting sequence with CTCN PAM
cugccaaucguguccgacug

SEQ ID NO: 8334 - RNA, 20 nt, Artificial Sequence
  targeting sequence with CTCN PAM
caaaccccagcaccuucuac

SEQ ID NO: 8335 - RNA, 20 nt, Artificial Sequence
  targeting sequence with CTCN PAM
aaccccagcaccuucuacaa

SEQ ID NO: 8336 - RNA, 20 nt, Artificial Sequence
  targeting sequence with CTCN PAM
uuuccuuccuaggcaugguu

SEQ ID NO: 8337 - RNA, 20 nt, Artificial Sequence
  targeting sequence with CTCN PAM
uguguaagaauucugaccac

SEQ ID NO: 8338 - RNA, 20 nt, Artificial Sequence
  targeting sequence with CTCN PAM
ugucugcgugcagcggcugc

SEQ ID NO: 8339 - RNA, 20 nt, Artificial Sequence
  targeting sequence with CTCN PAM
aaaaguauuaaagcaguggc

SEQ ID NO: 8340 - RNA, 20 nt, Artificial Sequence
  targeting sequence with CTCN PAM
aaaucacaaacuaugcucaa

SEQ ID NO: 8341 - RNA, 20 nt, Artificial Sequence
  targeting sequence with CTCN PAM
acucacucucuacauuucuc

SEQ ID NO: 8342 - RNA, 20 nt, Artificial Sequence
  targeting sequence with CTCN PAM
cucucuacauuucucauaac

SEQ ID NO: 8343 - RNA, 20 nt, Artificial Sequence
  targeting sequence with CTCN PAM
cuacauuucucauaacuucc

SEQ ID NO: 8344 - RNA, 20 nt, Artificial Sequence
  targeting sequence with CTCN PAM
acauuucucauaacuuccaa

SEQ ID NO: 8345 - RNA, 20 nt, Artificial Sequence
  targeting sequence with CTCN PAM
uaacuuccaaaaucuauuuu

SEQ ID NO: 8346 - RNA, 20 nt, Artificial Sequence
  targeting sequence with CTCN PAM
uaccugacacauauacuuuc

SEQ ID NO: 8347 - RNA, 20 nt, Artificial Sequence
  targeting sequence with CTCN PAM
uucagcuguacucacucuuu

SEQ ID NO: 8348 - RNA, 20 nt, Artificial Sequence
  targeting sequence with CTCN PAM
cucuuuguuaacucccacaa

SEQ ID NO: 8349 - RNA, 20 nt, Artificial Sequence
  targeting sequence with CTCN PAM
uuguuaacucccacaauuac

SEQ ID NO: 8350 - RNA, 20 nt, Artificial Sequence
  targeting sequence with CTCN PAM
cacaauuaccguuguuccug

SEQ ID NO: 8351 - RNA, 20 nt, Artificial Sequence
  targeting sequence with CTCN PAM
aucuggccucccacauuauu

SEQ ID NO: 8352 - RNA, 20 nt, Artificial Sequence
  targeting sequence with CTCN PAM
cacauuauuccugauaccac

SEQ ID NO: 8353 - RNA, 20 nt, Artificial Sequence
  targeting sequence with CTCN PAM
cugauccaccugacauucac

SEQ ID NO: 8354 - RNA, 20 nt, Artificial Sequence
  targeting sequence with CTCN PAM
gauccaccugacauucaccc

SEQ ID NO: 8355 - RNA, 20 nt, Artificial Sequence
  targeting sequence with CTCN PAM
cccugaucaugcuugauuua

SEQ ID NO: 8356 - RNA, 20 nt, Artificial Sequence
  targeting sequence with CTCN PAM
uagaaccucucauuuccuuu

SEQ ID NO: 8357 - RNA, 20 nt, Artificial Sequence
  targeting sequence with CTCN PAM
cauuuccuuuccaucaugga

SEQ ID NO: 8358 - RNA, 20 nt, Artificial Sequence
  targeting sequence with CTCN PAM
uuuccuuuccaucauggaaa

SEQ ID NO: 8359 - RNA, 20 nt, Artificial Sequence
  targeting sequence with CTCN PAM
aggaaauaacuucucagugu

SEQ ID NO: 8360 - RNA, 20 nt, Artificial Sequence
  targeting sequence with CTCN PAM
guguuccaucugcuauucua

SEQ ID NO: 8361 - RNA, 20 nt, Artificial Sequence
  targeting sequence with CTCN PAM
ucagggauuauucaggaccc

SEQ ID NO: 8362 - RNA, 20 nt, Artificial Sequence
  targeting sequence with CTCN PAM
gggauuauucaggaccccuc

SEQ ID NO: 8363 - RNA, 20 nt, Artificial Sequence
  targeting sequence with CTCN PAM
cuucccuacacaucaagcuc

SEQ ID NO: 8364 - RNA, 20 nt, Artificial Sequence
  targeting sequence with CTCN PAM
aggauuugccccacccagga

SEQ ID NO: 8365 - RNA, 20 nt, Artificial Sequence
  targeting sequence with CTCN PAM
agcuugauguguagggaagg

SEQ ID NO: 8366 - RNA, 20 nt, Artificial Sequence
  targeting sequence with CTCN PAM
acaugccugagucagauaac

SEQ ID NO: 8367 - RNA, 20 nt, Artificial Sequence
  targeting sequence with CTCN PAM
ggcauguugaguaaagcuaa

SEQ ID NO: 8368 - RNA, 20 nt, Artificial Sequence
  targeting sequence with CTCN PAM
uagucuggagguauuuuagu

SEQ ID NO: 8369 - RNA, 20 nt, Artificial Sequence
  targeting sequence with CTCN PAM
agacuaagagguauuuuagu

SEQ ID NO: 8370 - RNA, 20 nt, Artificial Sequence
  targeting sequence with CTCN PAM
gacccuguaggaaaggccag

SEQ ID NO: 8371 - RNA, 20 nt, Artificial Sequence
  targeting sequence with CTCN PAM
ucccuucugucagacacaau

SEQ ID NO: 8372 - RNA, 20 nt, Artificial Sequence
  targeting sequence with CTCN PAM
guuuagccuucccaccucaa

SEQ ID NO: 8373 - RNA, 20 nt, Artificial Sequence
  targeting sequence with CTCN PAM
auacagucugauaacagaug

SEQ ID NO: 8374 - RNA, 20 nt, Artificial Sequence
  targeting sequence with CTCN PAM
ucuguuaucagacuguauug

SEQ ID NO: 8375 - RNA, 20 nt, Artificial Sequence
  targeting sequence with CTCN PAM
uaguauucagugaaaccuuu

SEQ ID NO: 8376 - RNA, 20 nt, Artificial Sequence
  targeting sequence with CTCN PAM
gucuucaagaaaaguagaac

SEQ ID NO: 8377 - RNA, 20 nt, Artificial Sequence
  targeting sequence with CTCN PAM
ccaagcucagccaccaaaaa

SEQ ID NO: 8378 - RNA, 20 nt, Artificial Sequence
  targeting sequence with CTCN PAM
gccaccaaaaaggacuggac

SEQ ID NO: 8379 - RNA, 20 nt, Artificial Sequence
  targeting sequence with CTCN PAM
gaauucaggccuguccucgg

SEQ ID NO: 8380 - RNA, 20 nt, Artificial Sequence
  targeting sequence with CTCN PAM
gaaugcuacaagguacagcc

SEQ ID NO: 8381 - RNA, 20 nt, Artificial Sequence
  targeting sequence with CTCN PAM
uguauagacgcuccuuuuua

SEQ ID NO: 8382 - RNA, 20 nt, Artificial Sequence
  targeting sequence with CTCN PAM
uuuuuauuaggccccagucu

SEQ ID NO: 8383 - RNA, 20 nt, Artificial Sequence
  targeting sequence with CTCN PAM
uuccagacaccagaccaacu

SEQ ID NO: 8384 - RNA, 20 nt, Artificial Sequence
  targeting sequence with CTCN PAM
uauucaccguucucaacuac

SEQ ID NO: 8385 - RNA, 20 nt, Artificial Sequence
  targeting sequence with CTCN PAM
acuacucauacaugcccugc

SEQ ID NO: 8386 - RNA, 20 nt, Artificial Sequence
  targeting sequence with CTCN PAM
uacaugcccugcucuuguuu

SEQ ID NO: 8387 - RNA, 20 nt, Artificial Sequence
  targeting sequence with CTCN PAM
uguuuacacugccgguuuac

SEQ ID NO: 8388 - RNA, 20 nt, Artificial Sequence
  targeting sequence with CTCN PAM
aagccaucacagcugauauc

SEQ ID NO: 8389 - RNA, 20 nt, Artificial Sequence
  targeting sequence with CTCN PAM
cggugguaucccaaaacugc

SEQ ID NO: 8390 - RNA, 20 nt, Artificial Sequence
  targeting sequence with CTCN PAM
uaacucuugaaguaaauaaa

SEQ ID NO: 8391 - RNA, 20 nt, Artificial Sequence
  targeting sequence with CTCN PAM
ugaaguaaauaaauaaucuu

SEQ ID NO: 8392 - RNA, 20 nt, Artificial Sequence
  targeting sequence with CTCN PAM
uuaggcacucucuaauuaga

SEQ ID NO: 8393 - RNA, 20 nt, Artificial Sequence
  targeting sequence with CTCN PAM
cuaauuagauguccuagguc

SEQ ID NO: 8394 - RNA, 20 nt, Artificial Sequence
  targeting sequence with CTCN PAM
aauuagauguccuagguccu

SEQ ID NO: 8395 - RNA, 20 nt, Artificial Sequence
  targeting sequence with CTCN PAM
caauucuuaguccuuuuaua

SEQ ID NO: 8396 - RNA, 20 nt, Artificial Sequence
  targeting sequence with CTCN PAM
uucucuuauuccauuuaguu

SEQ ID NO: 8397 - RNA, 20 nt, Artificial Sequence
  targeting sequence with CTCN PAM
uauuccauuuaguuuuucaa

SEQ ID NO: 8398 - RNA, 20 nt, Artificial Sequence
  targeting sequence with CTCN PAM
cuucagcuuaaucucuccca

SEQ ID NO: 8399 - RNA, 20 nt, Artificial Sequence
  targeting sequence with CTCN PAM
cccauucuagguucccacgc

SEQ ID NO: 8400 - RNA, 20 nt, Artificial Sequence
  targeting sequence with CTCN PAM
cauucuagguucccacgccg

SEQ ID NO: 8401 - RNA, 20 nt, Artificial Sequence
  targeting sequence with CTCN PAM
gggcugcuucaagcgggauu

SEQ ID NO: 8402 - RNA, 20 nt, Artificial Sequence
  targeting sequence with CTCN PAM
cuccauaccaccccccaaaa

SEQ ID NO: 8403 - RNA, 20 nt, Artificial Sequence
  targeting sequence with CTCN PAM
ccauaccaccccccaaaaau

SEQ ID NO: 8404 - RNA, 20 nt, Artificial Sequence
  targeting sequence with CTCN PAM
auaccaccccccaaaaauuu

SEQ ID NO: 8405 - RNA, 20 nt, Artificial Sequence
  targeting sequence with CTCN PAM
gagcccaagccacgccaucg

SEQ ID NO: 8406 - RNA, 20 nt, Artificial Sequence
  targeting sequence with CTCN PAM
gaggccugacauuccugccu

SEQ ID NO: 8407 - RNA, 20 nt, Artificial Sequence
  targeting sequence with CTCN PAM
aaaagcacccccacugagca

SEQ ID NO: 8408 - RNA, 20 nt, Artificial Sequence
  targeting sequence with CTCN PAM
gugggggugcuuuuugagcc

SEQ ID NO: 8409 - RNA, 20 nt, Artificial Sequence
  targeting sequence with CTCN PAM
ugcccacugagcaccuugcg

SEQ ID NO: 8410 - RNA, 20 nt, Artificial Sequence
  targeting sequence with CTCN PAM
gugggcaggagugggggucg

SEQ ID NO: 8411 - RNA, 20 nt, Artificial Sequence
  targeting sequence with CTCN PAM
uacccgccagauaacaaacc

SEQ ID NO: 8412 - RNA, 20 nt, Artificial Sequence
  targeting sequence with CTCN PAM
cuucgcugacucucuuuucg

SEQ ID NO: 8413 - RNA, 20 nt, Artificial Sequence
  targeting sequence with CTCN PAM
cuuuucggacucagcccacc

SEQ ID NO: 8414 - RNA, 20 nt, Artificial Sequence
  targeting sequence with CTCN PAM
uuucggacucagcccaccug

SEQ ID NO: 8415 - RNA, 20 nt, Artificial Sequence
  targeting sequence with CTCN PAM
gcccaccugcacccagguga

SEQ ID NO: 8416 - RNA, 20 nt, Artificial Sequence
  targeting sequence with CTCN PAM
ucacacggacgcgcaugaaa

SEQ ID NO: 8417 - RNA, 20 nt, Artificial Sequence
  targeting sequence with CTCN PAM
ccacucacucacugacaccc

SEQ ID NO: 8418 - RNA, 20 nt, Artificial Sequence
  targeting sequence with CTCN PAM
cucacugacacccagagcca

SEQ ID NO: 8419 - RNA, 20 nt, Artificial Sequence
  targeting sequence with CTCN PAM
cugacacccagagccacuuc

SEQ ID NO: 8420 - RNA, 20 nt, Artificial Sequence
  targeting sequence with CTCN PAM
gggugucagugagugagugg

SEQ ID NO: 8421 - RNA, 20 nt, Artificial Sequence
  targeting sequence with CTCN PAM
guucaugcuaagugcccuac

SEQ ID NO: 8422 - RNA, 20 nt, Artificial Sequence
  targeting sequence with CTCN PAM
uuuacauuuuauuuuuacua

SEQ ID NO: 8423 - RNA, 20 nt, Artificial Sequence
  targeting sequence with CTCN PAM
aaaaaaaaaaaaaaaaaaaa

SEQ ID NO: 8424 - RNA, 20 nt, Artificial Sequence
  targeting sequence with CTCN PAM
gucucaaaaaaaaaaaaaaa

SEQ ID NO: 8425 - RNA, 20 nt, Artificial Sequence
  targeting sequence with CTCN PAM
cucuguugcccaggguggag

SEQ ID NO: 8426 - RNA, 20 nt, Artificial Sequence
  targeting sequence with CTCN PAM
guugcccaggguggagugca

SEQ ID NO: 8427 - RNA, 20 nt, Artificial Sequence
  targeting sequence with CTCN PAM
acccugggcaacagagugag

SEQ ID NO: 8428 - RNA, 20 nt, Artificial Sequence
  targeting sequence with CTCN PAM
gcucacugcaagcucugccu

SEQ ID NO: 8429 - RNA, 20 nt, Artificial Sequence
  targeting sequence with CTCN PAM
cugcaagcucugccucccgg

SEQ ID NO: 8430 - RNA, 20 nt, Artificial Sequence
  targeting sequence with CTCN PAM
gccucccggguucaugccau

SEQ ID NO: 8431 - RNA, 20 nt, Artificial Sequence
  targeting sequence with CTCN PAM
cggguucaugccauucuccu

SEQ ID NO: 8432 - RNA, 20 nt, Artificial Sequence
  targeting sequence with CTCN PAM
ugccucagccucccgaguag

SEQ ID NO: 8433 - RNA, 20 nt, Artificial Sequence
  targeting sequence with CTCN PAM
gccucccgaguagcugggac

SEQ ID NO: 8434 - RNA, 20 nt, Artificial Sequence
  targeting sequence with CTCN PAM
cgaguagcugggacuacagg

SEQ ID NO: 8435 - RNA, 20 nt, Artificial Sequence
  targeting sequence with CTCN PAM
ggaggcugaggcaggagaau

SEQ ID NO: 8436 - RNA, 20 nt, Artificial Sequence
  targeting sequence with CTCN PAM
aucuccugaccucgugaucc

SEQ ID NO: 8437 - RNA, 20 nt, Artificial Sequence
  targeting sequence with CTCN PAM
ugaccucgugauccacccgc

SEQ ID NO: 8438 - RNA, 20 nt, Artificial Sequence
  targeting sequence with CTCN PAM
ugauccacccgccucggccu

SEQ ID NO: 8439 - RNA, 20 nt, Artificial Sequence
  targeting sequence with CTCN PAM
gccucccaaagugcugggau

SEQ ID NO: 8440 - RNA, 20 nt, Artificial Sequence
  targeting sequence with CTCN PAM
caaagugcugggauuacagg

SEQ ID NO: 8441 - RNA, 20 nt, Artificial Sequence
  targeting sequence with CTCN PAM
cgccuguaaucccagcacuu

SEQ ID NO: 8442 - RNA, 20 nt, Artificial Sequence
  targeting sequence with CTCN PAM
uagacuacagacuuguacag

SEQ ID NO: 8443 - RNA, 20 nt, Artificial Sequence
  targeting sequence with CTCN PAM
guguguagugggcuacccca

SEQ ID NO: 8444 - RNA, 20 nt, Artificial Sequence
  targeting sequence with CTCN PAM
ggcucauagcccuuucaccu

SEQ ID NO: 8445 - RNA, 20 nt, Artificial Sequence
  targeting sequence with CTCN PAM
uagcccuuucaccugcuggg

SEQ ID NO: 8446 - RNA, 20 nt, Artificial Sequence
  targeting sequence with CTCN PAM
agaaacacgcugaaaucccc

SEQ ID NO: 8447 - RNA, 20 nt, Artificial Sequence
  targeting sequence with CTCN PAM
cuagaaacacgcugaaaucc

SEQ ID NO: 8448 - RNA, 20 nt, Artificial Sequence
  targeting sequence with CTCN PAM
ggcaccucaguccuuccacc

SEQ ID NO: 8449 - RNA, 20 nt, Artificial Sequence
  targeting sequence with CTCN PAM
guccuuccaccuccagagac

SEQ ID NO: 8450 - RNA, 20 nt, Artificial Sequence
  targeting sequence with CTCN PAM
agagaccuugccugccccuu

SEQ ID NO: 8451 - RNA, 20 nt, Artificial Sequence
  targeting sequence with CTCN PAM
ggagguggaaggacugaggu

SEQ ID NO: 8452 - RNA, 20 nt, Artificial Sequence
  targeting sequence with CTCN PAM
ugcccuugucacuacgauaa

SEQ ID NO: 8453 - RNA, 20 nt, Artificial Sequence
  targeting sequence with CTCN PAM
uccagaaccuccauuccaaa

SEQ ID NO: 8454 - RNA, 20 nt, Artificial Sequence
  targeting sequence with CTCN PAM
agaaccuccauuccaaacac

SEQ ID NO: 8455 - RNA, 20 nt, Artificial Sequence
  targeting sequence with CTCN PAM
auuccaaacacgcccuuucu

SEQ ID NO: 8456 - RNA, 20 nt, Artificial Sequence
  targeting sequence with CTCN PAM
caacuccaauauuuucauug

SEQ ID NO: 8457 - RNA, 20 nt, Artificial Sequence
  targeting sequence with CTCN PAM
aauauuuucauugacgccag

SEQ ID NO: 8458 - RNA, 20 nt, Artificial Sequence
  targeting sequence with CTCN PAM
cacucaccuccuugcacauc

SEQ ID NO: 8459 - RNA, 20 nt, Artificial Sequence
  targeting sequence with CTCN PAM
cucaccuccuugcacaucuc

SEQ ID NO: 8460 - RNA, 20 nt, Artificial Sequence
  targeting sequence with CTCN PAM
ccuccuugcacaucuccccu

SEQ ID NO: 8461 - RNA, 20 nt, Artificial Sequence
  targeting sequence with CTCN PAM
uugcacaucuccccuccucc

SEQ ID NO: 8462 - RNA, 20 nt, Artificial Sequence
  targeting sequence with CTCN PAM
ccuccucccagcccagacuu

SEQ ID NO: 8463 - RNA, 20 nt, Artificial Sequence
  targeting sequence with CTCN PAM
ucccagcccagacuucaugg

SEQ ID NO: 8464 - RNA, 20 nt, Artificial Sequence
  targeting sequence with CTCN PAM
cagcccagacuucauggucc

SEQ ID NO: 8465 - RNA, 20 nt, Artificial Sequence
  targeting sequence with CTCN PAM
ccacauccucguacuaguua

SEQ ID NO: 8466 - RNA, 20 nt, Artificial Sequence
  targeting sequence with CTCN PAM
uacuaguuauuguacucaca

SEQ ID NO: 8467 - RNA, 20 nt, Artificial Sequence
  targeting sequence with CTCN PAM
cagaggagaaaucccacucu

SEQ ID NO: 8468 - RNA, 20 nt, Artificial Sequence
  targeting sequence with CTCN PAM
gugaguacaauaacuaguac

SEQ ID NO: 8469 - RNA, 20 nt, Artificial Sequence
  targeting sequence with CTCN PAM
ucugugaguacaauaacuag

SEQ ID NO: 8470 - RNA, 20 nt, Artificial Sequence
  targeting sequence with CTCN PAM
acuuaaacucagccaccccc

SEQ ID NO: 8471 - RNA, 20 nt, Artificial Sequence
  targeting sequence with CTCN PAM
gccacccccaacccccugcu

SEQ ID NO: 8472 - RNA, 20 nt, Artificial Sequence
  targeting sequence with CTCN PAM
ugcacccaggcggcugagca

SEQ ID NO: 8473 - RNA, 20 nt, Artificial Sequence
  targeting sequence with CTCN PAM
gccgccugggugcaggagca

SEQ ID NO: 8474 - RNA, 20 nt, Artificial Sequence
  targeting sequence with CTCN PAM
ggcugugcucagccgccugg

SEQ ID NO: 8475 - RNA, 20 nt, Artificial Sequence
  targeting sequence with CTCN PAM
cuggcugugcucagccgccu

SEQ ID NO: 8476 - RNA, 20 nt, Artificial Sequence
  targeting sequence with CTCN PAM
cucacaaaccacucggcucc

SEQ ID NO: 8477 - RNA, 20 nt, Artificial Sequence
  targeting sequence with CTCN PAM
caaaccacucggcuccugug

SEQ ID NO: 8478 - RNA, 20 nt, Artificial Sequence
  targeting sequence with CTCN PAM
gcuccugugggcccuggagg

SEQ ID NO: 8479 - RNA, 20 nt, Artificial Sequence
  targeting sequence with CTCN PAM
ugugggcccuggaggcgguc

SEQ ID NO: 8480 - RNA, 20 nt, Artificial Sequence
  targeting sequence with CTCN PAM
agggcccacaggagccgagu

SEQ ID NO: 8481 - RNA, 20 nt, Artificial Sequence
  targeting sequence with CTCN PAM
guuuccaaguccauuucucu

SEQ ID NO: 8482 - RNA, 20 nt, Artificial Sequence
  targeting sequence with CTCN PAM
gccugacuuauuuauuuuau

SEQ ID NO: 8483 - RNA, 20 nt, Artificial Sequence
  targeting sequence with CTCN PAM
guaaaagcguauauaauagu

SEQ ID NO: 8484 - RNA, 20 nt, Artificial Sequence
  targeting sequence with CTCN PAM
gugagguacauucuguaacu

SEQ ID NO: 8485 - RNA, 20 nt, Artificial Sequence
  targeting sequence with CTCN PAM
cagaguuguuuaaaaaauac

SEQ ID NO: 8486 - RNA, 20 nt, Artificial Sequence
  targeting sequence with CTCN PAM
ucgucugugaaauggcaaua

SEQ ID NO: 8487 - RNA, 20 nt, Artificial Sequence
  targeting sequence with CTCN PAM
uccugugugucuaucucuuc

SEQ ID NO: 8488 - RNA, 20 nt, Artificial Sequence
  targeting sequence with CTCN PAM
aggacaagucacgcagucuc

SEQ ID NO: 8489 - RNA, 20 nt, Artificial Sequence
  targeting sequence with CTCN PAM
uuucuccuuaaacccccaaa

SEQ ID NO: 8490 - RNA, 20 nt, Artificial Sequence
  targeting sequence with CTCN PAM
uuaaacccccaaauccuucu

SEQ ID NO: 8491 - RNA, 20 nt, Artificial Sequence
  targeting sequence with CTCN PAM
cccagccugccuuauaguug

SEQ ID NO: 8492 - RNA, 20 nt, Artificial Sequence
  targeting sequence with CTCN PAM
uuggaauaggaagcaaggca

SEQ ID NO: 8493 - RNA, 20 nt, Artificial Sequence
  targeting sequence with CTCN PAM
auaaagagagaaccuccaau

SEQ ID NO: 8494 - RNA, 20 nt, Artificial Sequence
  targeting sequence with CTCN PAM
uuauugagucuauuuucuca

SEQ ID NO: 8495 - RNA, 20 nt, Artificial Sequence
  targeting sequence with CTCN PAM
cuuuauugagucuauuuucu

SEQ ID NO: 8496 - RNA, 20 nt, Artificial Sequence
  targeting sequence with CTCN PAM
aauggcuccccccuccacau

SEQ ID NO: 8497 - RNA, 20 nt, Artificial Sequence
  targeting sequence with CTCN PAM
ccccuccacaucaucucccu

SEQ ID NO: 8498 - RNA, 20 nt, Artificial Sequence
  targeting sequence with CTCN PAM
acaucaucucccuaccugcc

SEQ ID NO: 8499 - RNA, 20 nt, Artificial Sequence
  targeting sequence with CTCN PAM
cuaccugccugccugugccu

SEQ ID NO: 8500 - RNA, 20 nt, Artificial Sequence
  targeting sequence with CTCN PAM
uuuuccaccuuccccuguga

SEQ ID NO: 8501 - RNA, 20 nt, Artificial Sequence
  targeting sequence with CTCN PAM
agacaagggugcagccauaa

SEQ ID NO: 8502 - RNA, 20 nt, Artificial Sequence
  targeting sequence with CTCN PAM
auccucuagacaagggugca

SEQ ID NO: 8503 - RNA, 20 nt, Artificial Sequence
  targeting sequence with CTCN PAM
ccuccuaagagaugcucccu

SEQ ID NO: 8504 - RNA, 20 nt, Artificial Sequence
  targeting sequence with CTCN PAM
uaagagaugcucccuacucu

SEQ ID NO: 8505 - RNA, 20 nt, Artificial Sequence
  targeting sequence with CTCN PAM
uaggaggugagaagggaugg

SEQ ID NO: 8506 - RNA, 20 nt, Artificial Sequence
  targeting sequence with CTCN PAM
cuacucuccagcauugccag

SEQ ID NO: 8507 - RNA, 20 nt, Artificial Sequence
  targeting sequence with CTCN PAM
ccagcauugccagcuucucu

SEQ ID NO: 8508 - RNA, 20 nt, Artificial Sequence
  targeting sequence with CTCN PAM
agcauugccagcuucucugu

SEQ ID NO: 8509 - RNA, 20 nt, Artificial Sequence
  targeting sequence with CTCN PAM
gucucaacuguaacacuucc

SEQ ID NO: 8510 - RNA, 20 nt, Artificial Sequence
  targeting sequence with CTCN PAM
acuguaacacuuccaucagc

SEQ ID NO: 8511 - RNA, 20 nt, Artificial Sequence
  targeting sequence with CTCN PAM
gggccaucauccaucuuccu

SEQ ID NO: 8512 - RNA, 20 nt, Artificial Sequence
  targeting sequence with CTCN PAM
ucuuccugcauugucucuac

SEQ ID NO: 8513 - RNA, 20 nt, Artificial Sequence
  targeting sequence with CTCN PAM
uccugcauugucucuacaca

SEQ ID NO: 8514 - RNA, 20 nt, Artificial Sequence
  targeting sequence with CTCN PAM
acacaggccuuccuggugau

SEQ ID NO: 8515 - RNA, 20 nt, Artificial Sequence
  targeting sequence with CTCN PAM
acauggcuaaaucagaacac

SEQ ID NO: 8516 - RNA, 20 nt, Artificial Sequence
  targeting sequence with CTCN PAM
ccuugcuugucccgugggcc

SEQ ID NO: 8517 - RNA, 20 nt, Artificial Sequence
  targeting sequence with CTCN PAM
uuugacccaguuggucacuu

SEQ ID NO: 8518 - RNA, 20 nt, Artificial Sequence
  targeting sequence with CTCN PAM
uccuggacaugcucccucgu

SEQ ID NO: 8519 - RNA, 20 nt, Artificial Sequence
  targeting sequence with CTCN PAM
uggacaugcucccucgugau

SEQ ID NO: 8520 - RNA, 20 nt, Artificial Sequence
  targeting sequence with CTCN PAM
cucgugaucucugugagucc

SEQ ID NO: 8521 - RNA, 20 nt, Artificial Sequence
  targeting sequence with CTCN PAM
ugaucucugugaguccccug

SEQ ID NO: 8522 - RNA, 20 nt, Artificial Sequence
  targeting sequence with CTCN PAM
gugaguccccugucauugaa

SEQ ID NO: 8523 - RNA, 20 nt, Artificial Sequence
  targeting sequence with CTCN PAM
cagagaucacgagggagcau

SEQ ID NO: 8524 - RNA, 20 nt, Artificial Sequence
  targeting sequence with CTCN PAM
ccuaaguuccaugugacacc

SEQ ID NO: 8525 - RNA, 20 nt, Artificial Sequence
  targeting sequence with CTCN PAM
aacccaugcacccagaacuc

SEQ ID NO: 8526 - RNA, 20 nt, Artificial Sequence
  targeting sequence with CTCN PAM
ucaguucuccacuaagccac

SEQ ID NO: 8527 - RNA, 20 nt, Artificial Sequence
  targeting sequence with CTCN PAM
guucuccacuaagccacucc

SEQ ID NO: 8528 - RNA, 20 nt, Artificial Sequence
  targeting sequence with CTCN PAM
acuaagccacuccucucugg

SEQ ID NO: 8529 - RNA, 20 nt, Artificial Sequence
  targeting sequence with CTCN PAM
ucucugggcuccccagcugc

SEQ ID NO: 8530 - RNA, 20 nt, Artificial Sequence
  targeting sequence with CTCN PAM
cugggcuccccagcugcucc

SEQ ID NO: 8531 - RNA, 20 nt, Artificial Sequence
  targeting sequence with CTCN PAM
gggcuccccagcugcuccuu

SEQ ID NO: 8532 - RNA, 20 nt, Artificial Sequence
  targeting sequence with CTCN PAM
ccagcugcuccuuaagugac

SEQ ID NO: 8533 - RNA, 20 nt, Artificial Sequence
  targeting sequence with CTCN PAM
uuaagugacaaggccaaaac

SEQ ID NO: 8534 - RNA, 20 nt, Artificial Sequence
  targeting sequence with CTCN PAM
cacaucucaucuguggacaa

SEQ ID NO: 8535 - RNA, 20 nt, Artificial Sequence
  targeting sequence with CTCN PAM
caucucaucuguggacaaau

SEQ ID NO: 8536 - RNA, 20 nt, Artificial Sequence
  targeting sequence with CTCN PAM
ucuguggacaaauacaaaua

SEQ ID NO: 8537 - RNA, 20 nt, Artificial Sequence
  targeting sequence with CTCN PAM
gagucccacugcugccucug

SEQ ID NO: 8538 - RNA, 20 nt, Artificial Sequence
  targeting sequence with CTCN PAM
gaguguauuuguauuugucc

SEQ ID NO: 8539 - RNA, 20 nt, Artificial Sequence
  targeting sequence with CTCN PAM
gaucuaagccacuaccagug

SEQ ID NO: 8540 - RNA, 20 nt, Artificial Sequence
  targeting sequence with CTCN PAM
cagucucccaccugcucucu

SEQ ID NO: 8541 - RNA, 20 nt, Artificial Sequence
  targeting sequence with CTCN PAM
caccugcucucucugcuuuu

SEQ ID NO: 8542 - RNA, 20 nt, Artificial Sequence
  targeting sequence with CTCN PAM
cucugcuuuuacccugguca

SEQ ID NO: 8543 - RNA, 20 nt, Artificial Sequence
  targeting sequence with CTCN PAM
cugcuuuuacccuggucacc

SEQ ID NO: 8544 - RNA, 20 nt, Artificial Sequence
  targeting sequence with CTCN PAM
gcuuuuacccuggucaccga

SEQ ID NO: 8545 - RNA, 20 nt, Artificial Sequence
  targeting sequence with CTCN PAM
cagcaauccucaaaaauuau

SEQ ID NO: 8546 - RNA, 20 nt, Artificial Sequence
  targeting sequence with CTCN PAM
aaaauuauaaaucagaucau

SEQ ID NO: 8547 - RNA, 20 nt, Artificial Sequence
  targeting sequence with CTCN PAM
gauaugguuucgcugugucc

SEQ ID NO: 8548 - RNA, 20 nt, Artificial Sequence
  targeting sequence with CTCN PAM
gcuugaauuguauuucccag

SEQ ID NO: 8549 - RNA, 20 nt, Artificial Sequence
  targeting sequence with CTCN PAM
cacaacacgugggaauucug

SEQ ID NO: 8550 - RNA, 20 nt, Artificial Sequence
  targeting sequence with CTCN PAM
cccugggucccucccacaac

SEQ ID NO: 8551 - RNA, 20 nt, Artificial Sequence
  targeting sequence with CTCN PAM
ugguagugaauaagucucag

SEQ ID NO: 8552 - RNA, 20 nt, Artificial Sequence
  targeting sequence with CTCN PAM
ggagaucugauggguuuauc

SEQ ID NO: 8553 - RNA, 20 nt, Artificial Sequence
  targeting sequence with CTCN PAM
ugagacuuauucacuaccau

SEQ ID NO: 8554 - RNA, 20 nt, Artificial Sequence
  targeting sequence with CTCN PAM
ucauuuucucuugccuccgc

SEQ ID NO: 8555 - RNA, 20 nt, Artificial Sequence
  targeting sequence with CTCN PAM
uuuucucuugccuccgccau

SEQ ID NO: 8556 - RNA, 20 nt, Artificial Sequence
  targeting sequence with CTCN PAM
ugccuccgccauguaagaag

SEQ ID NO: 8557 - RNA, 20 nt, Artificial Sequence
  targeting sequence with CTCN PAM
gccauguaagaagugccuuu

SEQ ID NO: 8558 - RNA, 20 nt, Artificial Sequence
  targeting sequence with CTCN PAM
gaaucaugacgggaaacgaa

SEQ ID NO: 8559 - RNA, 20 nt, Artificial Sequence
  targeting sequence with CTCN PAM
gcagccacguggaacuauaa

SEQ ID NO: 8560 - RNA, 20 nt, Artificial Sequence
  targeting sequence with CTCN PAM
gguaugucuuuaucagcagc

SEQ ID NO: 8561 - RNA, 20 nt, Artificial Sequence
  targeting sequence with CTCN PAM
guaccaauuuacuggauuag

SEQ ID NO: 8562 - RNA, 20 nt, Artificial Sequence
  targeting sequence with CTCN PAM
caguaccaauuuacuggauu

SEQ ID NO: 8563 - RNA, 20 nt, Artificial Sequence
  targeting sequence with CTCN PAM
aaacuguuccaaauucugcc

SEQ ID NO: 8564 - RNA, 20 nt, Artificial Sequence
  targeting sequence with CTCN PAM
gaagaagacaggaaaaugug

SEQ ID NO: 8565 - RNA, 20 nt, Artificial Sequence
  targeting sequence with CTCN PAM
cauuuuccugucuucuucug

SEQ ID NO: 8566 - RNA, 20 nt, Artificial Sequence
  targeting sequence with CTCN PAM
aggaaguuccaaacuuucuc

SEQ ID NO: 8567 - RNA, 20 nt, Artificial Sequence
  targeting sequence with CTCN PAM
uagugauaugaacaauaagg

SEQ ID NO: 8568 - RNA, 20 nt, Artificial Sequence
  targeting sequence with CTCN PAM
ccuugggccuuauuguucau

SEQ ID NO: 8569 - RNA, 20 nt, Artificial Sequence
  targeting sequence with CTCN PAM
gagggggcagaugaggaacu

SEQ ID NO: 8570 - RNA, 20 nt, Artificial Sequence
  targeting sequence with CTCN PAM
gagaccaccucaccuugggc

SEQ ID NO: 8571 - RNA, 20 nt, Artificial Sequence
  targeting sequence with CTCN PAM
ucugcccccucugagaccac

SEQ ID NO: 8572 - RNA, 20 nt, Artificial Sequence
  targeting sequence with CTCN PAM
aguucccaacaaguuccuca

SEQ ID NO: 8573 - RNA, 20 nt, Artificial Sequence
  targeting sequence with CTCN PAM
uguuauguuuuagcaaagag

SEQ ID NO: 8574 - RNA, 20 nt, Artificial Sequence
  targeting sequence with CTCN PAM
uugcuaaaacauaacaggag

SEQ ID NO: 8575 - RNA, 20 nt, Artificial Sequence
  targeting sequence with CTCN PAM
agggcaggggcaaaauguug

SEQ ID NO: 8576 - RNA, 20 nt, Artificial Sequence
  targeting sequence with CTCN PAM
aguucgacguuccgcaaauc

SEQ ID NO: 8577 - RNA, 20 nt, Artificial Sequence
  targeting sequence with CTCN PAM
caaguucgacguuccgcaaa

SEQ ID NO: 8578 - RNA, 20 nt, Artificial Sequence
  targeting sequence with CTCN PAM
cucaaguucgacguuccgca

SEQ ID NO: 8579 - RNA, 20 nt, Artificial Sequence
  targeting sequence with CTCN PAM
ugaaugcuuugcugcuuaga

SEQ ID NO: 8580 - RNA, 20 nt, Artificial Sequence
  targeting sequence with CTCN PAM
gcuucccguucaaaacagaa

SEQ ID NO: 8581 - RNA, 20 nt, Artificial Sequence
  targeting sequence with CTCN PAM
aaaaauggguuuuucuuuuc

SEQ ID NO: 8582 - RNA, 20 nt, Artificial Sequence
  targeting sequence with CTCN PAM
ucaaaaaauggguuuuucuu

SEQ ID NO: 8583 - RNA, 20 nt, Artificial Sequence
  targeting sequence with CTCN PAM
uugcuacuuaggcaaauuuc

SEQ ID NO: 8584 - RNA, 20 nt, Artificial Sequence
  targeting sequence with CTCN PAM
aaaccauggagaaaaugucu

SEQ ID NO: 8585 - RNA, 20 nt, Artificial Sequence
  targeting sequence with CTCN PAM
augguuuugaggauuaacac

SEQ ID NO: 8586 - RNA, 20 nt, Artificial Sequence
  targeting sequence with CTCN PAM
aggccaugucagggaccuuc

SEQ ID NO: 8587 - RNA, 20 nt, Artificial Sequence
  targeting sequence with CTCN PAM
ucccaucacaggccuagagc

SEQ ID NO: 8588 - RNA, 20 nt, Artificial Sequence
  targeting sequence with CTCN PAM
caucacaggccuagagcccc

SEQ ID NO: 8589 - RNA, 20 nt, Artificial Sequence
  targeting sequence with CTCN PAM
aggccugugaugggaggagc

SEQ ID NO: 8590 - RNA, 20 nt, Artificial Sequence
  targeting sequence with CTCN PAM
uggggcucuaggccugugau

SEQ ID NO: 8591 - RNA, 20 nt, Artificial Sequence
  targeting sequence with CTCN PAM
gugucccagcugcuccaggc

SEQ ID NO: 8592 - RNA, 20 nt, Artificial Sequence
  targeting sequence with CTCN PAM
aggcauggcugaaagggguc

SEQ ID NO: 8593 - RNA, 20 nt, Artificial Sequence
  targeting sequence with CTCN PAM
gaagccacagcccaagcugu

SEQ ID NO: 8594 - RNA, 20 nt, Artificial Sequence
  targeting sequence with CTCN PAM
acaccacauagaaguugcca

SEQ ID NO: 8595 - RNA, 20 nt, Artificial Sequence
  targeting sequence with CTCN PAM
auucuugacuucugugcacc

SEQ ID NO: 8596 - RNA, 20 nt, Artificial Sequence
  targeting sequence with CTCN PAM
accuagauuucagaagacgu

SEQ ID NO: 8597 - RNA, 20 nt, Artificial Sequence
  targeting sequence with CTCN PAM
uggagaaccucugguaggac

SEQ ID NO: 8598 - RNA, 20 nt, Artificial Sequence
  targeting sequence with CTCN PAM
augagcaccccacccugaag

SEQ ID NO: 8599 - RNA, 20 nt, Artificial Sequence
  targeting sequence with CTCN PAM
gguaggacagugcagaaggg

SEQ ID NO: 8600 - RNA, 20 nt, Artificial Sequence
  targeting sequence with CTCN PAM
acuaggcaaugccccaguag

SEQ ID NO: 8601 - RNA, 20 nt, Artificial Sequence
  targeting sequence with CTCN PAM
gcuccacuaggcaaugcccc

SEQ ID NO: 8602 - RNA, 20 nt, Artificial Sequence
  targeting sequence with CTCN PAM
acucagcuccacuaggcaau

SEQ ID NO: 8603 - RNA, 20 nt, Artificial Sequence
  targeting sequence with CTCN PAM
agaccccagaaugguagauc

SEQ ID NO: 8604 - RNA, 20 nt, Artificial Sequence
  targeting sequence with CTCN PAM
uggaaaaucugcagacaauc

SEQ ID NO: 8605 - RNA, 20 nt, Artificial Sequence
  targeting sequence with CTCN PAM
caacagcuuucaugggcugg

SEQ ID NO: 8606 - RNA, 20 nt, Artificial Sequence
  targeting sequence with CTCN PAM
cucccaacagcuuucauggg

SEQ ID NO: 8607 - RNA, 20 nt, Artificial Sequence
  targeting sequence with CTCN PAM
gccccugugacuuugcaggg

SEQ ID NO: 8608 - RNA, 20 nt, Artificial Sequence
  targeting sequence with CTCN PAM
ugcaucagcgugaccuggau

SEQ ID NO: 8609 - RNA, 20 nt, Artificial Sequence
  targeting sequence with CTCN PAM
cauccaggucacgcugaugc

SEQ ID NO: 8610 - RNA, 20 nt, Artificial Sequence
  targeting sequence with CTCN PAM
acaucucacauccaggucac

SEQ ID NO: 8611 - RNA, 20 nt, Artificial Sequence
  targeting sequence with CTCN PAM
uuugacuccacaucucacau

SEQ ID NO: 8612 - RNA, 20 nt, Artificial Sequence
  targeting sequence with CTCN PAM
aaaaugaucuccuuugacuc

SEQ ID NO: 8613 - RNA, 20 nt, Artificial Sequence
  targeting sequence with CTCN PAM
cauuuggaauggcuguauuu

SEQ ID NO: 8614 - RNA, 20 nt, Artificial Sequence
  targeting sequence with CTCN PAM
uagguggaagggacuugccu

SEQ ID NO: 8615 - RNA, 20 nt, Artificial Sequence
  targeting sequence with CTCN PAM
gaugagacuuuggacugugg

SEQ ID NO: 8616 - RNA, 20 nt, Artificial Sequence
  targeting sequence with CTCN PAM
ucugagacaaggcaaguccc

SEQ ID NO: 8617 - RNA, 20 nt, Artificial Sequence
  targeting sequence with CTCN PAM
uuucagcauugacccaaaag

SEQ ID NO: 8618 - RNA, 20 nt, Artificial Sequence
  targeting sequence with CTCN PAM
aaguuuuaacucauuucagc

SEQ ID NO: 8619 - RNA, 20 nt, Artificial Sequence
  targeting sequence with CTCN PAM
caaaguuuuaacucauuuca

SEQ ID NO: 8620 - RNA, 20 nt, Artificial Sequence
  targeting sequence with CTCN PAM
cauuucaaaaccaaucaugc

SEQ ID NO: 8621 - RNA, 20 nt, Artificial Sequence
  targeting sequence with CTCN PAM
aaauuucauguccucacauu

SEQ ID NO: 8622 - RNA, 20 nt, Artificial Sequence
  targeting sequence with CTCN PAM
cagcuugaauugugucuccc

SEQ ID NO: 8623 - RNA, 20 nt, Artificial Sequence
  targeting sequence with CTCN PAM
cagaauucccacauguugug

SEQ ID NO: 8624 - RNA, 20 nt, Artificial Sequence
  targeting sequence with CTCN PAM
cacaacaugugggaauucug

SEQ ID NO: 8625 - RNA, 20 nt, Artificial Sequence
  targeting sequence with CTCN PAM
cucccacaacaugugggaau

SEQ ID NO: 8626 - RNA, 20 nt, Artificial Sequence
  targeting sequence with CTCN PAM
cuggcucccucccacaacau

SEQ ID NO: 8627 - RNA, 20 nt, Artificial Sequence
  targeting sequence with CTCN PAM
cccuggcucccucccacaac

SEQ ID NO: 8628 - RNA, 20 nt, Artificial Sequence
  targeting sequence with CTCN PAM
ugauagugaauaagucucau

SEQ ID NO: 8629 - RNA, 20 nt, Artificial Sequence
  targeting sequence with CTCN PAM
uaggaucugaugggauuauc

SEQ ID NO: 8630 - RNA, 20 nt, Artificial Sequence
  targeting sequence with CTCN PAM
ugcuguugccauguaagaag

SEQ ID NO: 8631 - RNA, 20 nt, Artificial Sequence
  targeting sequence with CTCN PAM
ugccgugauucugaggccug

SEQ ID NO: 8632 - RNA, 20 nt, Artificial Sequence
  targeting sequence with CTCN PAM
gaaucacggcaggaggcgaa

SEQ ID NO: 8633 - RNA, 20 nt, Artificial Sequence
  targeting sequence with CTCN PAM
uuuucuucccagucuugggu

SEQ ID NO: 8634 - RNA, 20 nt, Artificial Sequence
  targeting sequence with CTCN PAM
ucugcuuaaaaccugcccuu

SEQ ID NO: 8635 - RNA, 20 nt, Artificial Sequence
  targeting sequence with CTCN PAM
gcuuaaaaccugcccuuagc

SEQ ID NO: 8636 - RNA, 20 nt, Artificial Sequence
  targeting sequence with CTCN PAM
ccaccuucccggagaaaagc

SEQ ID NO: 8637 - RNA, 20 nt, Artificial Sequence
  targeting sequence with CTCN PAM
accuucccggagaaaagcca

SEQ ID NO: 8638 - RNA, 20 nt, Artificial Sequence
  targeting sequence with CTCN PAM
gggaagguggagagcuaagg

SEQ ID NO: 8639 - RNA, 20 nt, Artificial Sequence
  targeting sequence with CTCN PAM
ggcuuuucuccgggaaggug

SEQ ID NO: 8640 - RNA, 20 nt, Artificial Sequence
  targeting sequence with CTCN PAM
ccaaccauucuggggacucu

SEQ ID NO: 8641 - RNA, 20 nt, Artificial Sequence
  targeting sequence with CTCN PAM
cccaggucugcccccacacc

SEQ ID NO: 8642 - RNA, 20 nt, Artificial Sequence
  targeting sequence with CTCN PAM
agcccagcucuuccuugcag

SEQ ID NO: 8643 - RNA, 20 nt, Artificial Sequence
  targeting sequence with CTCN PAM
uccuugcaggcuccuuccca

SEQ ID NO: 8644 - RNA, 20 nt, Artificial Sequence
  targeting sequence with CTCN PAM
uucccaucucugggcuguuc

SEQ ID NO: 8645 - RNA, 20 nt, Artificial Sequence
  targeting sequence with CTCN PAM
gggcuguuccagucuggggc

SEQ ID NO: 8646 - RNA, 20 nt, Artificial Sequence
  targeting sequence with CTCN PAM
acuguguccacggcccgucc

SEQ ID NO: 8647 - RNA, 20 nt, Artificial Sequence
  targeting sequence with CTCN PAM
cagcuccuuuccuccagugu

SEQ ID NO: 8648 - RNA, 20 nt, Artificial Sequence
  targeting sequence with CTCN PAM
gcuccuuuccuccaguguuc

SEQ ID NO: 8649 - RNA, 20 nt, Artificial Sequence
  targeting sequence with CTCN PAM
uuuccuccaguguucucuuu

SEQ ID NO: 8650 - RNA, 20 nt, Artificial Sequence
  targeting sequence with CTCN PAM
aguguucucuuugcacaccg

SEQ ID NO: 8651 - RNA, 20 nt, Artificial Sequence
  targeting sequence with CTCN PAM
uugcacaccgcccuguuuua

SEQ ID NO: 8652 - RNA, 20 nt, Artificial Sequence
  targeting sequence with CTCN PAM
cacccucuucucuuuuccuu

SEQ ID NO: 8653 - RNA, 20 nt, Artificial Sequence
  targeting sequence with CTCN PAM
ucucuuuuccuuuuccucca

SEQ ID NO: 8654 - RNA, 20 nt, Artificial Sequence
  targeting sequence with CTCN PAM
uuuccuuuuccuccauggca

SEQ ID NO: 8655 - RNA, 20 nt, Artificial Sequence
  targeting sequence with CTCN PAM
auggcacucaucaccaucuc

SEQ ID NO: 8656 - RNA, 20 nt, Artificial Sequence
  targeting sequence with CTCN PAM
ucaccaucucacacaguaca

SEQ ID NO: 8657 - RNA, 20 nt, Artificial Sequence
  targeting sequence with CTCN PAM
cacaguacauguuugauuug

SEQ ID NO: 8658 - RNA, 20 nt, Artificial Sequence
  targeting sequence with CTCN PAM
aguagggcggaacagacgac

SEQ ID NO: 8659 - RNA, 20 nt, Artificial Sequence
  targeting sequence with CTCN PAM
cucuaguagggcggaacaga

SEQ ID NO: 8660 - RNA, 20 nt, Artificial Sequence
  targeting sequence with CTCN PAM
gucauuaaacauacauguca

SEQ ID NO: 8661 - RNA, 20 nt, Artificial Sequence
  targeting sequence with CTCN PAM
agcuuggugcuagggaugcc

SEQ ID NO: 8662 - RNA, 20 nt, Artificial Sequence
  targeting sequence with CTCN PAM
ggcagguucccugcuuauac

SEQ ID NO: 8663 - RNA, 20 nt, Artificial Sequence
  targeting sequence with CTCN PAM
guauaagcagggaaccugcc

SEQ ID NO: 8664 - RNA, 20 nt, Artificial Sequence
  targeting sequence with CTCN PAM
cugacagguuugcaggcagc

SEQ ID NO: 8665 - RNA, 20 nt, Artificial Sequence
  targeting sequence with CTCN PAM
gacagguuugcaggcagccc

SEQ ID NO: 8666 - RNA, 20 nt, Artificial Sequence
  targeting sequence with CTCN PAM
caugugcaguaggggcuaca

SEQ ID NO: 8667 - RNA, 20 nt, Artificial Sequence
  targeting sequence with CTCN PAM
caaguagagaguugcagccc

SEQ ID NO: 8668 - RNA, 20 nt, Artificial Sequence
  targeting sequence with CTCN PAM
aguagagaguugcagcccug

SEQ ID NO: 8669 - RNA, 20 nt, Artificial Sequence
  targeting sequence with CTCN PAM
acuugagagcauuuccuccc

SEQ ID NO: 8670 - RNA, 20 nt, Artificial Sequence
  targeting sequence with CTCN PAM
cuacuugagagcauuuccuc

SEQ ID NO: 8671 - RNA, 20 nt, Artificial Sequence
  targeting sequence with CTCN PAM
ccgaccucaggagggagagc

SEQ ID NO: 8672 - RNA, 20 nt, Artificial Sequence
  targeting sequence with CTCN PAM
ggagggagagcccugagcuc

SEQ ID NO: 8673 - RNA, 20 nt, Artificial Sequence
  targeting sequence with CTCN PAM
ugaggucggggagacagggc

SEQ ID NO: 8674 - RNA, 20 nt, Artificial Sequence
  targeting sequence with CTCN PAM
cuccugaggucggggagaca

SEQ ID NO: 8675 - RNA, 20 nt, Artificial Sequence
  targeting sequence with CTCN PAM
cccuccugaggucggggaga

SEQ ID NO: 8676 - RNA, 20 nt, Artificial Sequence
  targeting sequence with CTCN PAM
gggcucucccuccugagguc

SEQ ID NO: 8677 - RNA, 20 nt, Artificial Sequence
  targeting sequence with CTCN PAM
aacccuugcccucuggggcu

SEQ ID NO: 8678 - RNA, 20 nt, Artificial Sequence
  targeting sequence with CTCN PAM
ggggcuaugggaaacagcug

SEQ ID NO: 8679 - RNA, 20 nt, Artificial Sequence
  targeting sequence with CTCN PAM
cuuuccagcuguuucccaua

SEQ ID NO: 8680 - RNA, 20 nt, Artificial Sequence
  targeting sequence with CTCN PAM
gacccauagcugugugaugu

SEQ ID NO: 8681 - RNA, 20 nt, Artificial Sequence
  targeting sequence with CTCN PAM
cccucucugccucucaauuu

SEQ ID NO: 8682 - RNA, 20 nt, Artificial Sequence
  targeting sequence with CTCN PAM
cucucugccucucaauuuuc

SEQ ID NO: 8683 - RNA, 20 nt, Artificial Sequence
  targeting sequence with CTCN PAM
cugccucucaauuuucuugu

SEQ ID NO: 8684 - RNA, 20 nt, Artificial Sequence
  targeting sequence with CTCN PAM
gccucucaauuuucuugucu

SEQ ID NO: 8685 - RNA, 20 nt, Artificial Sequence
  targeting sequence with CTCN PAM
caauuuucuugucuauuaaa

SEQ ID NO: 8686 - RNA, 20 nt, Artificial Sequence
  targeting sequence with CTCN PAM
auuuucuugucuauuaaaca

SEQ ID NO: 8687 - RNA, 20 nt, Artificial Sequence
  targeting sequence with CTCN PAM
guuuaauagacaagaaaauu

SEQ ID NO: 8688 - RNA, 20 nt, Artificial Sequence
  targeting sequence with CTCN PAM
uucgccccagcccuguggga

SEQ ID NO: 8689 - RNA, 20 nt, Artificial Sequence
  targeting sequence with CTCN PAM
uuguccacaaagcauuuuca

SEQ ID NO: 8690 - RNA, 20 nt, Artificial Sequence
  targeting sequence with CTCN PAM
ucuuuguccacaaagcauuu

SEQ ID NO: 8691 - RNA, 20 nt, Artificial Sequence
  targeting sequence with CTCN PAM
uccucuuuguccacaaagca

SEQ ID NO: 8692 - RNA, 20 nt, Artificial Sequence
  targeting sequence with CTCN PAM
aagagaggagccauguuuau

SEQ ID NO: 8693 - RNA, 20 nt, Artificial Sequence
  targeting sequence with CTCN PAM
uggagcacuuagaacuccuc

SEQ ID NO: 8694 - RNA, 20 nt, Artificial Sequence
  targeting sequence with CTCN PAM
cuuggagcacuuagaacucc

SEQ ID NO: 8695 - RNA, 20 nt, Artificial Sequence
  targeting sequence with CTCN PAM
ucucuuggagcacuuagaac

SEQ ID NO: 8696 - RNA, 20 nt, Artificial Sequence
  targeting sequence with CTCN PAM
gaaaaaccccaaaagacaua

SEQ ID NO: 8697 - RNA, 20 nt, Artificial Sequence
  targeting sequence with CTCN PAM
accucagaaaaaccccaaaa

SEQ ID NO: 8698 - RNA, 20 nt, Artificial Sequence
  targeting sequence with CTCN PAM
cucuguugcccagcugaagu

SEQ ID NO: 8699 - RNA, 20 nt, Artificial Sequence
  targeting sequence with CTCN PAM
guugcccagcugaagugcag

SEQ ID NO: 8700 - RNA, 20 nt, Artificial Sequence
  targeting sequence with CTCN PAM
gcucaccgcaaccucugccu

SEQ ID NO: 8701 - RNA, 20 nt, Artificial Sequence
  targeting sequence with CTCN PAM
ccgcaaccucugccucccgg

SEQ ID NO: 8702 - RNA, 20 nt, Artificial Sequence
  targeting sequence with CTCN PAM
gccucccggguucaagcaau

SEQ ID NO: 8703 - RNA, 20 nt, Artificial Sequence
  targeting sequence with CTCN PAM
cggguucaagcaauuccccu

SEQ ID NO: 8704 - RNA, 20 nt, Artificial Sequence
  targeting sequence with CTCN PAM
cuaguagcugggauuacagg

SEQ ID NO: 8705 - RNA, 20 nt, Artificial Sequence
  targeting sequence with CTCN PAM
acuaaaauacaaaaauuagc

SEQ ID NO: 8706 - RNA, 20 nt, Artificial Sequence
  targeting sequence with CTCN PAM
aacuccugaccucaauugau

SEQ ID NO: 8707 - RNA, 20 nt, Artificial Sequence
  targeting sequence with CTCN PAM
ugaccucaauugauccgucu

SEQ ID NO: 8708 - RNA, 20 nt, Artificial Sequence
  targeting sequence with CTCN PAM
auugauccgucugccucgga

SEQ ID NO: 8709 - RNA, 20 nt, Artificial Sequence
  targeting sequence with CTCN PAM
gacucccaaaaugcugggau

SEQ ID NO: 8710 - RNA, 20 nt, Artificial Sequence
  targeting sequence with CTCN PAM
caaaaugcugggauuacagg

SEQ ID NO: 8711 - RNA, 20 nt, Artificial Sequence
  targeting sequence with CTCN PAM
cgccuguaaucccagcauuu

SEQ ID NO: 8712 - RNA, 20 nt, Artificial Sequence
  targeting sequence with CTCN PAM
cuuauaauuccauuuggggu

SEQ ID NO: 8713 - RNA, 20 nt, Artificial Sequence
  targeting sequence with CTCN PAM
uauaauuccauuuggggucu

SEQ ID NO: 8714 - RNA, 20 nt, Artificial Sequence
  targeting sequence with CTCN PAM
gcauaaacaacauaagauuu

SEQ ID NO: 8715 - RNA, 20 nt, Artificial Sequence
  targeting sequence with CTCN PAM
auuuauuucuuuuuaccagc

SEQ ID NO: 8716 - RNA, 20 nt, Artificial Sequence
  targeting sequence with CTCN PAM
auugaugaauguuuggauug

SEQ ID NO: 8717 - RNA, 20 nt, Artificial Sequence
  targeting sequence with CTCN PAM
uauugaauuucuuccagggg

SEQ ID NO: 8718 - RNA, 20 nt, Artificial Sequence
  targeting sequence with CTCN PAM
cuuugaucugccaggguguc

SEQ ID NO: 8719 - RNA, 20 nt, Artificial Sequence
  targeting sequence with CTCN PAM
cacuuugaucugccagggug

SEQ ID NO: 8720 - RNA, 20 nt, Artificial Sequence
  targeting sequence with CTCN PAM
aauaaaacucucacuuugau

SEQ ID NO: 8721 - RNA, 20 nt, Artificial Sequence
  targeting sequence with CTCN PAM
ucuaauaaaacucucacuuu

SEQ ID NO: 8722 - RNA, 20 nt, Artificial Sequence
  targeting sequence with CTCN PAM
accagcuuuacugucuccuc

SEQ ID NO: 8723 - RNA, 20 nt, Artificial Sequence
  targeting sequence with CTCN PAM
ccgcuccaccagcuuuacug

SEQ ID NO: 8724 - RNA, 20 nt, Artificial Sequence
  targeting sequence with CTCN PAM
ccccgcuccaccagcuuuac

SEQ ID NO: 8725 - RNA, 20 nt, Artificial Sequence
  targeting sequence with CTCN PAM
gacugcaacauguugauuca

SEQ ID NO: 8726 - RNA, 20 nt, Artificial Sequence
  targeting sequence with CTCN PAM
uaccaccccaagaggcagga

SEQ ID NO: 8727 - RNA, 20 nt, Artificial Sequence
  targeting sequence with CTCN PAM
uggggugguaugaguccugg

SEQ ID NO: 8728 - RNA, 20 nt, Artificial Sequence
  targeting sequence with CTCN PAM
ugccucuuggggugguauga

SEQ ID NO: 8729 - RNA, 20 nt, Artificial Sequence
  targeting sequence with CTCN PAM
gugcccuucuggcugcgcug

SEQ ID NO: 8730 - RNA, 20 nt, Artificial Sequence
  targeting sequence with CTCN PAM
ucagugcccuucuggcugcg

SEQ ID NO: 8731 - RNA, 20 nt, Artificial Sequence
  targeting sequence with CTCN PAM
cuguggcucccagcagcggg

SEQ ID NO: 8732 - RNA, 20 nt, Artificial Sequence
  targeting sequence with CTCN PAM
cagcagcgggaccagaugca

SEQ ID NO: 8733 - RNA, 20 nt, Artificial Sequence
  targeting sequence with CTCN PAM
guaaagacugaacaggguau

SEQ ID NO: 8734 - RNA, 20 nt, Artificial Sequence
  targeting sequence with CTCN PAM
uaaaacagcuucugacucag

SEQ ID NO: 8735 - RNA, 20 nt, Artificial Sequence
  targeting sequence with CTCN PAM
gcucuuaaaacagcuucuga

SEQ ID NO: 8736 - RNA, 20 nt, Artificial Sequence
  targeting sequence with CTCN PAM
gcuguaaaaugggugugcuc

SEQ ID NO: 8737 - RNA, 20 nt, Artificial Sequence
  targeting sequence with CTCN PAM
agccucauccuugaauggug

SEQ ID NO: 8738 - RNA, 20 nt, Artificial Sequence
  targeting sequence with CTCN PAM
uccuugaaugguggguguac

SEQ ID NO: 8739 - RNA, 20 nt, Artificial Sequence
  targeting sequence with CTCN PAM
acacacuuuaguugcucucc

SEQ ID NO: 8740 - RNA, 20 nt, Artificial Sequence
  targeting sequence with CTCN PAM
ccguuugcacaaugauuucu

SEQ ID NO: 8741 - RNA, 20 nt, Artificial Sequence
  targeting sequence with CTCN PAM
guuugcacaaugauuucuau

SEQ ID NO: 8742 - RNA, 20 nt, Artificial Sequence
  targeting sequence with CTCN PAM
uuguccacuugccuaauuau

SEQ ID NO: 8743 - RNA, 20 nt, Artificial Sequence
  targeting sequence with CTCN PAM
agucaguagcaaacugugaa

SEQ ID NO: 8744 - RNA, 20 nt, Artificial Sequence
  targeting sequence with CTCN PAM
acaucuaauucuggcuguuu

SEQ ID NO: 8745 - RNA, 20 nt, Artificial Sequence
  targeting sequence with CTCN PAM
cuugcgacucuacaucuaau

SEQ ID NO: 8746 - RNA, 20 nt, Artificial Sequence
  targeting sequence with CTCN PAM
cugauuagaaaugacgucuu

SEQ ID NO: 8747 - RNA, 20 nt, Artificial Sequence
  targeting sequence with CTCN PAM
uuuuuucucccugauuagaa

SEQ ID NO: 8748 - RNA, 20 nt, Artificial Sequence
  targeting sequence with CTCN PAM
agaaggcuagccuauuguuc

SEQ ID NO: 8749 - RNA, 20 nt, Artificial Sequence
  targeting sequence with CTCN PAM
cuccuuauacaaaaguaaau

SEQ ID NO: 8750 - RNA, 20 nt, Artificial Sequence
  targeting sequence with CTCN PAM
uuauacaaaaguaaauccca

SEQ ID NO: 8751 - RNA, 20 nt, Artificial Sequence
  targeting sequence with CTCN PAM
uuuuuuaaaucuuuuuuuaa

SEQ ID NO: 8752 - RNA, 20 nt, Artificial Sequence
  targeting sequence with CTCN PAM
uuaucaagaucauauaaaaa

SEQ ID NO: 8753 - RNA, 20 nt, Artificial Sequence
  targeting sequence with CTCN PAM
uccuuaucaagaucauauaa

SEQ ID NO: 8754 - RNA, 20 nt, Artificial Sequence
  targeting sequence with CTCN PAM
augaaaauuaaaauuuucua

SEQ ID NO: 8755 - RNA, 20 nt, Artificial Sequence
  targeting sequence with CTCN PAM
uauguauguugcaaaucuau

SEQ ID NO: 8756 - RNA, 20 nt, Artificial Sequence
  targeting sequence with CTCN PAM
acagccaaaaugaaaaaaug

SEQ ID NO: 8757 - RNA, 20 nt, Artificial Sequence
  targeting sequence with CTCN PAM
ucauuuuuucauuuuggcug

SEQ ID NO: 8758 - RNA, 20 nt, Artificial Sequence
  targeting sequence with CTCN PAM
guguuggccugggugugacc

SEQ ID NO: 8759 - RNA, 20 nt, Artificial Sequence
  targeting sequence with CTCN PAM
uggucacacccaggccaaca

SEQ ID NO: 8760 - RNA, 20 nt, Artificial Sequence
  targeting sequence with CTCN PAM
uccuucugggcacuuggugu

SEQ ID NO: 8761 - RNA, 20 nt, Artificial Sequence
  targeting sequence with CTCN PAM
uucugggcacuuggugugau

SEQ ID NO: 8762 - RNA, 20 nt, Artificial Sequence
  targeting sequence with CTCN PAM
cuuaggagaaggaaauguga

SEQ ID NO: 8763 - RNA, 20 nt, Artificial Sequence
  targeting sequence with CTCN PAM
uaagcgagacacaugaccac

SEQ ID NO: 8764 - RNA, 20 nt, Artificial Sequence
  targeting sequence with CTCN PAM
augcagcuuccacacaaaag

SEQ ID NO: 8765 - RNA, 20 nt, Artificial Sequence
  targeting sequence with CTCN PAM
uugcuuuccgucagccucag

SEQ ID NO: 8766 - RNA, 20 nt, Artificial Sequence
  targeting sequence with CTCN PAM
guguucagcaauguucugaa

SEQ ID NO: 8767 - RNA, 20 nt, Artificial Sequence
  targeting sequence with CTCN PAM
ccccagaaccagacugauaa

SEQ ID NO: 8768 - RNA, 20 nt, Artificial Sequence
  targeting sequence with CTCN PAM
cauguccaucaaggacuuug

SEQ ID NO: 8769 - RNA, 20 nt, Artificial Sequence
  targeting sequence with CTCN PAM
ccucacauguccaucaagga

SEQ ID NO: 8770 - RNA, 20 nt, Artificial Sequence
  targeting sequence with CTCN PAM
ggggcuugaaaugucaaagg

SEQ ID NO: 8771 - RNA, 20 nt, Artificial Sequence
  targeting sequence with CTCN PAM
agcacugcucgugggaagac

SEQ ID NO: 8772 - RNA, 20 nt, Artificial Sequence
  targeting sequence with CTCN PAM
ugggaagacaucaucaauau

SEQ ID NO: 8773 - RNA, 20 nt, Artificial Sequence
  targeting sequence with CTCN PAM
auauugaugaugucuuccca

SEQ ID NO: 8774 - RNA, 20 nt, Artificial Sequence
  targeting sequence with CTCN PAM
aaauuccacuuccaggaauu

SEQ ID NO: 8775 - RNA, 20 nt, Artificial Sequence
  targeting sequence with CTCN PAM
cacaugugcaaacagcuaug

SEQ ID NO: 8776 - RNA, 20 nt, Artificial Sequence
  targeting sequence with CTCN PAM
caugugcaaacagcuaugga

SEQ ID NO: 8777 - RNA, 20 nt, Artificial Sequence
  targeting sequence with CTCN PAM
gaauaaaaaccacacuggua

SEQ ID NO: 8778 - RNA, 20 nt, Artificial Sequence
  targeting sequence with CTCN PAM
ccaccccaccaauauaaaua

SEQ ID NO: 8779 - RNA, 20 nt, Artificial Sequence
  targeting sequence with CTCN PAM
accccaccaauauaaauaaa

SEQ ID NO: 8780 - RNA, 20 nt, Artificial Sequence
  targeting sequence with CTCN PAM
uuaacccacuuuuuaaaauu

SEQ ID NO: 8781 - RNA, 20 nt, Artificial Sequence
  targeting sequence with CTCN PAM
gaaaagauacccaauaaaua

SEQ ID NO: 8782 - RNA, 20 nt, Artificial Sequence
  targeting sequence with CTCN PAM
ugcaguuauggaagccagaa

SEQ ID NO: 8783 - RNA, 20 nt, Artificial Sequence
  targeting sequence with CTCN PAM
cccaaagcucuaggggagga

SEQ ID NO: 8784 - RNA, 20 nt, Artificial Sequence
  targeting sequence with CTCN PAM
caaagcucuaggggaggaac

SEQ ID NO: 8785 - RNA, 20 nt, Artificial Sequence
  targeting sequence with CTCN PAM
aggggaggaacauuccuugc

SEQ ID NO: 8786 - RNA, 20 nt, Artificial Sequence
  targeting sequence with CTCN PAM
ccuagagcuuugggagaggg

SEQ ID NO: 8787 - RNA, 20 nt, Artificial Sequence
  targeting sequence with CTCN PAM
uuugggggcuccuggcauuc

SEQ ID NO: 8788 - RNA, 20 nt, Artificial Sequence
  targeting sequence with CTCN PAM
uggcauuccuuggcuuaugu

SEQ ID NO: 8789 - RNA, 20 nt, Artificial Sequence
  targeting sequence with CTCN PAM
aaucggcgccuccauuguua

SEQ ID NO: 8790 - RNA, 20 nt, Artificial Sequence
  targeting sequence with CTCN PAM
auuguuacauagguguuucu

SEQ ID NO: 8791 - RNA, 20 nt, Artificial Sequence
  targeting sequence with CTCN PAM
aguaucucuccccuuucucu

SEQ ID NO: 8792 - RNA, 20 nt, Artificial Sequence
  targeting sequence with CTCN PAM
ccccuuucucuucugauauc

SEQ ID NO: 8793 - RNA, 20 nt, Artificial Sequence
  targeting sequence with CTCN PAM
ccuuucucuucugauaucag

SEQ ID NO: 8794 - RNA, 20 nt, Artificial Sequence
  targeting sequence with CTCN PAM
ucugauaucagucauuggau

SEQ ID NO: 8795 - RNA, 20 nt, Artificial Sequence
  targeting sequence with CTCN PAM
ucaugagauccuuaggucaa

SEQ ID NO: 8796 - RNA, 20 nt, Artificial Sequence
  targeting sequence with CTCN PAM
ugagauccuuaggucaauua

SEQ ID NO: 8797 - RNA, 20 nt, Artificial Sequence
  targeting sequence with CTCN PAM
ugaggagauuauccuggguu

SEQ ID NO: 8798 - RNA, 20 nt, Artificial Sequence
  targeting sequence with CTCN PAM
uuuccaaauaaggucacauu

SEQ ID NO: 8799 - RNA, 20 nt, Artificial Sequence
  targeting sequence with CTCN PAM
gaagguggugguucaggagu

SEQ ID NO: 8800 - RNA, 20 nt, Artificial Sequence
  targeting sequence with CTCN PAM
ugaaccaccaccuucugagg

SEQ ID NO: 8801 - RNA, 20 nt, Artificial Sequence
  targeting sequence with CTCN PAM
cacuccugaaccaccaccuu

SEQ ID NO: 8802 - RNA, 20 nt, Artificial Sequence
  targeting sequence with CTCN PAM
cuugcaaaaaagaguaugcc

SEQ ID NO: 8803 - RNA, 20 nt, Artificial Sequence
  targeting sequence with CTCN PAM
uuuuugcaagggagggggca

SEQ ID NO: 8804 - RNA, 20 nt, Artificial Sequence
  targeting sequence with CTCN PAM
cagcaaugguggcugcagac

SEQ ID NO: 8805 - RNA, 20 nt, Artificial Sequence
  targeting sequence with CTCN PAM
aaguuucugagguuggagaa

SEQ ID NO: 8806 - RNA, 20 nt, Artificial Sequence
  targeting sequence with CTCN PAM
gaaacuuggagucugcagcc

SEQ ID NO: 8807 - RNA, 20 nt, Artificial Sequence
  targeting sequence with CTCN PAM
aaccucagaaacuuggaguc

SEQ ID NO: 8808 - RNA, 20 nt, Artificial Sequence
  targeting sequence with CTCN PAM
cuggcuaccuucuccaaccu

SEQ ID NO: 8809 - RNA, 20 nt, Artificial Sequence
  targeting sequence with CTCN PAM
cuuuuaugcucccuggcuac

SEQ ID NO: 8810 - RNA, 20 nt, Artificial Sequence
  targeting sequence with CTCN PAM
uucagucuaugaggggaagg

SEQ ID NO: 8811 - RNA, 20 nt, Artificial Sequence
  targeting sequence with CTCN PAM
uagacugaaugaguagauag

SEQ ID NO: 8812 - RNA, 20 nt, Artificial Sequence
  targeting sequence with CTCN PAM
aaaugcuuuucuagccauug

SEQ ID NO: 8813 - RNA, 20 nt, Artificial Sequence
  targeting sequence with CTCN PAM
aaaaaugccacuuuuacugu

SEQ ID NO: 8814 - RNA, 20 nt, Artificial Sequence
  targeting sequence with CTCN PAM
cucuaaaaaugccacuuuua

SEQ ID NO: 8815 - RNA, 20 nt, Artificial Sequence
  targeting sequence with CTCN PAM
aggcuuccucccucuaaaaa

SEQ ID NO: 8816 - RNA, 20 nt, Artificial Sequence
  targeting sequence with CTCN PAM
ggaagaggcauuuagggaua

SEQ ID NO: 8817 - RNA, 20 nt, Artificial Sequence
  targeting sequence with CTCN PAM
uccugaguuauucuuucccu

SEQ ID NO: 8818 - RNA, 20 nt, Artificial Sequence
  targeting sequence with CTCN PAM
uaucccuaaaugccucuucc

SEQ ID NO: 8819 - RNA, 20 nt, Artificial Sequence
  targeting sequence with CTCN PAM
ucuuaucccuaaaugccucu

SEQ ID NO: 8820 - RNA, 20 nt, Artificial Sequence
  targeting sequence with CTCN PAM
uccucuuaucccuaaaugcc

SEQ ID NO: 8821 - RNA, 20 nt, Artificial Sequence
  targeting sequence with CTCN PAM
ccuccucuuaucccuaaaug

SEQ ID NO: 8822 - RNA, 20 nt, Artificial Sequence
  targeting sequence with CTCN PAM
ucuccuccucuuaucccuaa

SEQ ID NO: 8823 - RNA, 20 nt, Artificial Sequence
  targeting sequence with CTCN PAM
acuaucuccucuccuccucu

SEQ ID NO: 8824 - RNA, 20 nt, Artificial Sequence
  targeting sequence with CTCN PAM
gcagggaucaccuaccucca

SEQ ID NO: 8825 - RNA, 20 nt, Artificial Sequence
  targeting sequence with CTCN PAM
ccugccccaaucuggccucc

SEQ ID NO: 8826 - RNA, 20 nt, Artificial Sequence
  targeting sequence with CTCN PAM
gcugacacuccccugcccca

SEQ ID NO: 8827 - RNA, 20 nt, Artificial Sequence
  targeting sequence with CTCN PAM
uauacucagcugacacuccc

SEQ ID NO: 8828 - RNA, 20 nt, Artificial Sequence
  targeting sequence with CTCN PAM
gcccugaaggaggaaggcag

SEQ ID NO: 8829 - RNA, 20 nt, Artificial Sequence
  targeting sequence with CTCN PAM
uucagggcagaggggaccau

SEQ ID NO: 8830 - RNA, 20 nt, Artificial Sequence
  targeting sequence with CTCN PAM
ugccuuccuccuucagggca

SEQ ID NO: 8831 - RNA, 20 nt, Artificial Sequence
  targeting sequence with CTCN PAM
accacaagugcuuucugggu

SEQ ID NO: 8832 - RNA, 20 nt, Artificial Sequence
  targeting sequence with CTCN PAM
ccuccaccacaagugcuuuc

SEQ ID NO: 8833 - RNA, 20 nt, Artificial Sequence
  targeting sequence with CTCN PAM
ucuggggccuccccuccacc

SEQ ID NO: 8834 - RNA, 20 nt, Artificial Sequence
  targeting sequence with CTCN PAM
caggggagcuggcugcuuau

SEQ ID NO: 8835 - RNA, 20 nt, Artificial Sequence
  targeting sequence with CTCN PAM
ggggagcuggcugcuuauuu

SEQ ID NO: 8836 - RNA, 20 nt, Artificial Sequence
  targeting sequence with CTCN PAM
ccugagagguaccagcaauc

SEQ ID NO: 8837 - RNA, 20 nt, Artificial Sequence
  targeting sequence with CTCN PAM
aauggguucccccacacccu

SEQ ID NO: 8838 - RNA, 20 nt, Artificial Sequence
  targeting sequence with CTCN PAM
ucucaaauggguucccccac

SEQ ID NO: 8839 - RNA, 20 nt, Artificial Sequence
  targeting sequence with CTCN PAM
cucuucucaaauggguuccc

SEQ ID NO: 8840 - RNA, 20 nt, Artificial Sequence
  targeting sequence with CTCN PAM
cauaaguugcccaaaggaau

SEQ ID NO: 8841 - RNA, 20 nt, Artificial Sequence
  targeting sequence with CTCN PAM
ccaauuaccccucccauaag

SEQ ID NO: 8842 - RNA, 20 nt, Artificial Sequence
  targeting sequence with CTCN PAM
ugccacuuggcagggcuuuc

SEQ ID NO: 8843 - RNA, 20 nt, Artificial Sequence
  targeting sequence with CTCN PAM
uaagagugcaguggaggaua

SEQ ID NO: 8844 - RNA, 20 nt, Artificial Sequence
  targeting sequence with CTCN PAM
uaugaggggcagccccagcu

SEQ ID NO: 8845 - RNA, 20 nt, Artificial Sequence
  targeting sequence with CTCN PAM
acugcacucuuaugaggggc

SEQ ID NO: 8846 - RNA, 20 nt, Artificial Sequence
  targeting sequence with CTCN PAM
ucccauauccuccacugcac

SEQ ID NO: 8847 - RNA, 20 nt, Artificial Sequence
  targeting sequence with CTCN PAM
gguuccaucugucgcagagc

SEQ ID NO: 8848 - RNA, 20 nt, Artificial Sequence
  targeting sequence with CTCN PAM
gcgacagauggaaccagagg

SEQ ID NO: 8849 - RNA, 20 nt, Artificial Sequence
  targeting sequence with CTCN PAM
cccaccucccucagaacaca

SEQ ID NO: 8850 - RNA, 20 nt, Artificial Sequence
  targeting sequence with CTCN PAM
cucagaacacacccacugca

SEQ ID NO: 8851 - RNA, 20 nt, Artificial Sequence
  targeting sequence with CTCN PAM
gaacacacccacugcaugcu

SEQ ID NO: 8852 - RNA, 20 nt, Artificial Sequence
  targeting sequence with CTCN PAM
gugcacaggcuucaucauuc

SEQ ID NO: 8853 - RNA, 20 nt, Artificial Sequence
  targeting sequence with CTCN PAM
gggugcacgguaacgacccc

SEQ ID NO: 8854 - RNA, 20 nt, Artificial Sequence
  targeting sequence with CTCN PAM
ccuaccggggucguuaccgu

SEQ ID NO: 8855 - RNA, 20 nt, Artificial Sequence
  targeting sequence with CTCN PAM
caccuaccggggucguuacc

SEQ ID NO: 8856 - RNA, 20 nt, Artificial Sequence
  targeting sequence with CTCN PAM
ccuuugggaccuuggccucu

SEQ ID NO: 8857 - RNA, 20 nt, Artificial Sequence
  targeting sequence with CTCN PAM
caucuauucuugcuccaggg

SEQ ID NO: 8858 - RNA, 20 nt, Artificial Sequence
  targeting sequence with CTCN PAM
aggggaggccuuugaugagg

SEQ ID NO: 8859 - RNA, 20 nt, Artificial Sequence
  targeting sequence with CTCN PAM
ccuggagcaagaauagaugg

SEQ ID NO: 8860 - RNA, 20 nt, Artificial Sequence
  targeting sequence with CTCN PAM
ucaaaggccuccccuggagc

SEQ ID NO: 8861 - RNA, 20 nt, Artificial Sequence
  targeting sequence with CTCN PAM
uuccuguugccuguaauugg

SEQ ID NO: 8862 - RNA, 20 nt, Artificial Sequence
  targeting sequence with CTCN PAM
gccaccucugucagcaaacc

SEQ ID NO: 8863 - RNA, 20 nt, Artificial Sequence
  targeting sequence with CTCN PAM
gucagcaaaccaugagcucc

SEQ ID NO: 8864 - RNA, 20 nt, Artificial Sequence
  targeting sequence with CTCN PAM
ugguuugcugacagaggugg

SEQ ID NO: 8865 - RNA, 20 nt, Artificial Sequence
  targeting sequence with CTCN PAM
uacucugugcugcgauggcg

SEQ ID NO: 8866 - RNA, 20 nt, Artificial Sequence
  targeting sequence with CTCN PAM
gugcugcgauggcgggcucg

SEQ ID NO: 8867 - RNA, 20 nt, Artificial Sequence
  targeting sequence with CTCN PAM
auggggauaacucugaccuu

SEQ ID NO: 8868 - RNA, 20 nt, Artificial Sequence
  targeting sequence with CTCN PAM
gaccuuaccucauggaguca

SEQ ID NO: 8869 - RNA, 20 nt, Artificial Sequence
  targeting sequence with CTCN PAM
uggagucacugucaacccac

SEQ ID NO: 8870 - RNA, 20 nt, Artificial Sequence
  targeting sequence with CTCN PAM
augagguaaggucagaguua

SEQ ID NO: 8871 - RNA, 20 nt, Artificial Sequence
  targeting sequence with CTCN PAM
cuggagugaggucuuugcaa

SEQ ID NO: 8872 - RNA, 20 nt, Artificial Sequence
  targeting sequence with CTCN PAM
ggagugaggucuuugcaaac

SEQ ID NO: 8873 - RNA, 20 nt, Artificial Sequence
  targeting sequence with CTCN PAM
agagagccagugcacaaaga

SEQ ID NO: 8874 - RNA, 20 nt, Artificial Sequence
  targeting sequence with CTCN PAM
cuccagagagccagugcaca

SEQ ID NO: 8875 - RNA, 20 nt, Artificial Sequence
  targeting sequence with CTCN PAM
uuccacuuuguuugcaaaga

SEQ ID NO: 8876 - RNA, 20 nt, Artificial Sequence
  targeting sequence with CTCN PAM
agcaccuagauucagagcag

SEQ ID NO: 8877 - RNA, 20 nt, Artificial Sequence
  targeting sequence with CTCN PAM
gaaucuaggugcuggagucc

SEQ ID NO: 8878 - RNA, 20 nt, Artificial Sequence
  targeting sequence with CTCN PAM
gaaucugcugugcaucugca

SEQ ID NO: 8879 - RNA, 20 nt, Artificial Sequence
  targeting sequence with CTCN PAM
cuugcagaugcacagcagau

SEQ ID NO: 8880 - RNA, 20 nt, Artificial Sequence
  targeting sequence with CTCN PAM
uucuggaagggcugucgaua

SEQ ID NO: 8881 - RNA, 20 nt, Artificial Sequence
  targeting sequence with CTCN PAM
ugucaugccacauguacaau

SEQ ID NO: 8882 - RNA, 20 nt, Artificial Sequence
  targeting sequence with CTCN PAM
gauuguacauguggcaugac

SEQ ID NO: 8883 - RNA, 20 nt, Artificial Sequence
  targeting sequence with CTCN PAM
uggccucagauuguacaugu

SEQ ID NO: 8884 - RNA, 20 nt, Artificial Sequence
  targeting sequence with CTCN PAM
cuuuccccuuuucauccucc

SEQ ID NO: 8885 - RNA, 20 nt, Artificial Sequence
  targeting sequence with CTCN PAM
uuccccuuuucauccuccug

SEQ ID NO: 8886 - RNA, 20 nt, Artificial Sequence
  targeting sequence with CTCN PAM
ugccugguacacaauaggug

SEQ ID NO: 8887 - RNA, 20 nt, Artificial Sequence
  targeting sequence with CTCN PAM
gcuuuccagaagauucaauu

SEQ ID NO: 8888 - RNA, 20 nt, Artificial Sequence
  targeting sequence with CTCN PAM
ucaaggagcagcuaguuggu

SEQ ID NO: 8889 - RNA, 20 nt, Artificial Sequence
  targeting sequence with CTCN PAM
uugaagagauugcuugcuuu

SEQ ID NO: 8890 - RNA, 20 nt, Artificial Sequence
  targeting sequence with CTCN PAM
gcccuuuaugcacccugcac

SEQ ID NO: 8891 - RNA, 20 nt, Artificial Sequence
  targeting sequence with CTCN PAM
ggccucugcccuuuaugcac

SEQ ID NO: 8892 - RNA, 20 nt, Artificial Sequence
  targeting sequence with CTCN PAM
cugcccaccgaauucuuucc

SEQ ID NO: 8893 - RNA, 20 nt, Artificial Sequence
  targeting sequence with CTCN PAM
ucgcugcccaccgaauucuu

SEQ ID NO: 8894 - RNA, 20 nt, Artificial Sequence
  targeting sequence with CTCN PAM
cuggucagcaggagacaagg

SEQ ID NO: 8895 - RNA, 20 nt, Artificial Sequence
  targeting sequence with CTCN PAM
ugcugaccagugagacuucu

SEQ ID NO: 8896 - RNA, 20 nt, Artificial Sequence
  targeting sequence with CTCN PAM
aaguucugccgggcccaccu

SEQ ID NO: 8897 - RNA, 20 nt, Artificial Sequence
  targeting sequence with CTCN PAM
cccugcgugggaugccagac

SEQ ID NO: 8898 - RNA, 20 nt, Artificial Sequence
  targeting sequence with CTCN PAM
cacccugcgugggaugccag

SEQ ID NO: 8899 - RNA, 20 nt, Artificial Sequence
  targeting sequence with CTCN PAM
cgccucucacccugcguggg

SEQ ID NO: 8900 - RNA, 20 nt, Artificial Sequence
  targeting sequence with CTCN PAM
cccgccucucacccugcgug

SEQ ID NO: 8901 - RNA, 20 nt, Artificial Sequence
  targeting sequence with CTCN PAM
ucucccgccucucacccugc

SEQ ID NO: 8902 - RNA, 20 nt, Artificial Sequence
  targeting sequence with CTCN PAM
uccucucccgccucucaccc

SEQ ID NO: 8903 - RNA, 20 nt, Artificial Sequence
  targeting sequence with CTCN PAM
caaauccuaacugggcugga

SEQ ID NO: 8904 - RNA, 20 nt, Artificial Sequence
  targeting sequence with CTCN PAM
gcgcguaaucugacgcuguu

SEQ ID NO: 8905 - RNA, 20 nt, Artificial Sequence
  targeting sequence with CTCN PAM
ccaaacagcgucagauuacg

SEQ ID NO: 8906 - RNA, 20 nt, Artificial Sequence
  targeting sequence with CTCN PAM
cccuccccaaacagcgucag

SEQ ID NO: 8907 - RNA, 20 nt, Artificial Sequence
  targeting sequence with CTCN PAM
aguccggggguuccguuaau

SEQ ID NO: 8908 - RNA, 20 nt, Artificial Sequence
  targeting sequence with CTCN PAM
gguggcgugaucugcgcgcc

SEQ ID NO: 8909 - RNA, 20 nt, Artificial Sequence
  targeting sequence with CTCN PAM
acgucgcugcggaaaccuuc

SEQ ID NO: 8910 - RNA, 20 nt, Artificial Sequence
  targeting sequence with CTCN PAM
ugguugcaggcgggcgccgc

SEQ ID NO: 8911 - RNA, 20 nt, Artificial Sequence
  targeting sequence with CTCN PAM
gacccugaacugaacggcgg

SEQ ID NO: 8912 - RNA, 20 nt, Artificial Sequence
  targeting sequence with CTCN PAM
aggcucagacccugaacuga

SEQ ID NO: 8913 - RNA, 20 nt, Artificial Sequence
  targeting sequence with CTCN PAM
uccaggcucagacccugaac

SEQ ID NO: 8914 - RNA, 20 nt, Artificial Sequence
  targeting sequence with CTCN PAM
cuccuccaggcucagacccu

SEQ ID NO: 8915 - RNA, 20 nt, Artificial Sequence
  targeting sequence with CTCN PAM
cugccuggcucacuccucca

SEQ ID NO: 8916 - RNA, 20 nt, Artificial Sequence
  targeting sequence with CTCN PAM
ggcgggccgggacgcgucgu

SEQ ID NO: 8917 - RNA, 20 nt, Artificial Sequence
  targeting sequence with CTCN PAM
cagcucccagccaggauucc

SEQ ID NO: 8918 - RNA, 20 nt, Artificial Sequence
  targeting sequence with CTCN PAM
cagccaggauuccgcgcgcc

SEQ ID NO: 8919 - RNA, 20 nt, Artificial Sequence
  targeting sequence with CTCN PAM
ugaacuucagcuccugcaca

SEQ ID NO: 8920 - RNA, 20 nt, Artificial Sequence
  targeting sequence with CTCN PAM
ugcacaguccuccccaccgc

SEQ ID NO: 8921 - RNA, 20 nt, Artificial Sequence
  targeting sequence with CTCN PAM
ccaccgcaaggcucaaggcg

SEQ ID NO: 8922 - RNA, 20 nt, Artificial Sequence
  targeting sequence with CTCN PAM
aggcgccgccggcguggacc

SEQ ID NO: 8923 - RNA, 20 nt, Artificial Sequence
  targeting sequence with CTCN PAM
aggucuccucgccaggacag

SEQ ID NO: 8924 - RNA, 20 nt, Artificial Sequence
  targeting sequence with CTCN PAM
ucgccaggacagcaaccucu

SEQ ID NO: 8925 - RNA, 20 nt, Artificial Sequence
  targeting sequence with CTCN PAM
ccaggacagcaaccucuccc

SEQ ID NO: 8926 - RNA, 20 nt, Artificial Sequence
  targeting sequence with CTCN PAM
ccccuggcccucaugggcac

SEQ ID NO: 8927 - RNA, 20 nt, Artificial Sequence
  targeting sequence with CTCN PAM
ccuggcccucaugggcaccg

SEQ ID NO: 8928 - RNA, 20 nt, Artificial Sequence
  targeting sequence with CTCN PAM
ugggcaccgucagcuccagg

SEQ ID NO: 8929 - RNA, 20 nt, Artificial Sequence
  targeting sequence with CTCN PAM
aggcgguccugguggccgcu

SEQ ID NO: 8930 - RNA, 20 nt, Artificial Sequence
  targeting sequence with CTCN PAM
ugggucccgcgggcgcccgu

SEQ ID NO: 8931 - RNA, 20 nt, Artificial Sequence
  targeting sequence with CTCN PAM
ugcgcacgggcgcccgcggg

SEQ ID NO: 8932 - RNA, 20 nt, Artificial Sequence
  targeting sequence with CTCN PAM
uccuccugcgcacgggcgcc

SEQ ID NO: 8933 - RNA, 20 nt, Artificial Sequence
  targeting sequence with CTCN PAM
uagucgccguccucguccuc

SEQ ID NO: 8934 - RNA, 20 nt, Artificial Sequence
  targeting sequence with CTCN PAM
ucguagucgccguccucguc

SEQ ID NO: 8935 - RNA, 20 nt, Artificial Sequence
  targeting sequence with CTCN PAM
gaacgcaaggcuagcaccag

SEQ ID NO: 8936 - RNA, 20 nt, Artificial Sequence
  targeting sequence with CTCN PAM
ucggaacgcaaggcuagcac

SEQ ID NO: 8937 - RNA, 20 nt, Artificial Sequence
  targeting sequence with CTCN PAM
ggugcuucggccaggccguc

SEQ ID NO: 8938 - RNA, 20 nt, Artificial Sequence
  targeting sequence with CTCN PAM
caucccuacacccgcaccuu

SEQ ID NO: 8939 - RNA, 20 nt, Artificial Sequence
  targeting sequence with CTCN PAM
cgggccucaguuucccccca

SEQ ID NO: 8940 - RNA, 20 nt, Artificial Sequence
  targeting sequence with CTCN PAM
ggccucaguuuccccccaug

SEQ ID NO: 8941 - RNA, 20 nt, Artificial Sequence
  targeting sequence with CTCN PAM
guuuccccccauguaagaga

SEQ ID NO: 8942 - RNA, 20 nt, Artificial Sequence
  targeting sequence with CTCN PAM
uacauggggggaaacugagg

SEQ ID NO: 8943 - RNA, 20 nt, Artificial Sequence
  targeting sequence with CTCN PAM
cuuacauggggggaaacuga

SEQ ID NO: 8944 - RNA, 20 nt, Artificial Sequence
  targeting sequence with CTCN PAM
acuuccucucuuacaugggg

SEQ ID NO: 8945 - RNA, 20 nt, Artificial Sequence
  targeting sequence with CTCN PAM
gcgaccugcacuccacuucc

SEQ ID NO: 8946 - RNA, 20 nt, Artificial Sequence
  targeting sequence with CTCN PAM
ucgcuuggcacgaucuuggg

SEQ ID NO: 8947 - RNA, 20 nt, Artificial Sequence
  targeting sequence with CTCN PAM
cccgccgccuugccugcagu

SEQ ID NO: 8948 - RNA, 20 nt, Artificial Sequence
  targeting sequence with CTCN PAM
ccacuacccguccucccccg

SEQ ID NO: 8949 - RNA, 20 nt, Artificial Sequence
  targeting sequence with CTCN PAM
accgugcuccccacuacccg

SEQ ID NO: 8950 - RNA, 20 nt, Artificial Sequence
  targeting sequence with CTCN PAM
ccaccgugcuccccacuacc

SEQ ID NO: 8951 - RNA, 20 nt, Artificial Sequence
  targeting sequence with CTCN PAM
uuggggacuugcuggggcgu

SEQ ID NO: 8952 - RNA, 20 nt, Artificial Sequence
  targeting sequence with CTCN PAM
caaccccgcgaaccuuccca

SEQ ID NO: 8953 - RNA, 20 nt, Artificial Sequence
  targeting sequence with CTCN PAM
gggucucccaaccccgcgaa

SEQ ID NO: 8954 - RNA, 20 nt, Artificial Sequence
  targeting sequence with CTCN PAM
gccuccgggucucccaaccc

SEQ ID NO: 8955 - RNA, 20 nt, Artificial Sequence
  targeting sequence with CTCN PAM
cccuuccucggccuccgggu

SEQ ID NO: 8956 - RNA, 20 nt, Artificial Sequence
  targeting sequence with CTCN PAM
gcucgcccuuccucggccuc

SEQ ID NO: 8957 - RNA, 20 nt, Artificial Sequence
  targeting sequence with CTCN PAM
ccgcggcacaggugggugaa

SEQ ID NO: 8958 - RNA, 20 nt, Artificial Sequence
  targeting sequence with CTCN PAM
uucacccaccugugccgcgg

SEQ ID NO: 8959 - RNA, 20 nt, Artificial Sequence
  targeting sequence with CTCN PAM
gugccuggugcaguucccag

SEQ ID NO: 8960 - RNA, 20 nt, Artificial Sequence
  targeting sequence with CTCN PAM
gcugcccauguuuuccaaac

SEQ ID NO: 8961 - RNA, 20 nt, Artificial Sequence
  targeting sequence with CTCN PAM
acccuccgcugcccauguuu

SEQ ID NO: 8962 - RNA, 20 nt, Artificial Sequence
  targeting sequence with CTCN PAM
aggcccuccacccuccgcug

SEQ ID NO: 8963 - RNA, 20 nt, Artificial Sequence
  targeting sequence with CTCN PAM
ccaggcccuccacccuccgc

SEQ ID NO: 8964 - RNA, 20 nt, Artificial Sequence
  targeting sequence with CTCN PAM
gguagggccuucucuccagg

SEQ ID NO: 8965 - RNA, 20 nt, Artificial Sequence
  targeting sequence with CTCN PAM
cagcaucugccguccuuccc

SEQ ID NO: 8966 - RNA, 20 nt, Artificial Sequence
  targeting sequence with CTCN PAM
ugcucccagcaucugccguc

SEQ ID NO: 8967 - RNA, 20 nt, Artificial Sequence
  targeting sequence with CTCN PAM
ugcucuaguauuccaucugu

SEQ ID NO: 8968 - RNA, 20 nt, Artificial Sequence
  targeting sequence with CTCN PAM
aguauuccaucuguuucagc

SEQ ID NO: 8969 - RNA, 20 nt, Artificial Sequence
  targeting sequence with CTCN PAM
ccugccccuucagcugguuc

SEQ ID NO: 8970 - RNA, 20 nt, Artificial Sequence
  targeting sequence with CTCN PAM
gccccuucuccccugccccu

SEQ ID NO: 8971 - RNA, 20 nt, Artificial Sequence
  targeting sequence with CTCN PAM
aggcccauuggcguccuuua

SEQ ID NO: 8972 - RNA, 20 nt, Artificial Sequence
  targeting sequence with CTCN PAM
agaauaccuccgccccuucu

SEQ ID NO: 8973 - RNA, 20 nt, Artificial Sequence
  targeting sequence with CTCN PAM
ggcagggaagggcccuuggu

SEQ ID NO: 8974 - RNA, 20 nt, Artificial Sequence
  targeting sequence with CTCN PAM
ggagccggagguggugcgcc

SEQ ID NO: 8975 - RNA, 20 nt, Artificial Sequence
  targeting sequence with CTCN PAM
agagcaccaagggcccuucc

SEQ ID NO: 8976 - RNA, 20 nt, Artificial Sequence
  targeting sequence with CTCN PAM
ggcuccagagcaccaagggc

SEQ ID NO: 8977 - RNA, 20 nt, Artificial Sequence
  targeting sequence with CTCN PAM
ggggucccaguaccaggcgc

SEQ ID NO: 8978 - RNA, 20 nt, Artificial Sequence
  targeting sequence with CTCN PAM
gcuccggggucccaguacca

SEQ ID NO: 8979 - RNA, 20 nt, Artificial Sequence
  targeting sequence with CTCN PAM
gcccaccuggcugucugccg

SEQ ID NO: 8980 - RNA, 20 nt, Artificial Sequence
  targeting sequence with CTCN PAM
ccccgcacacggucggcaga

SEQ ID NO: 8981 - RNA, 20 nt, Artificial Sequence
  targeting sequence with CTCN PAM
acaacucugccagcuucugg

SEQ ID NO: 8982 - RNA, 20 nt, Artificial Sequence
  targeting sequence with CTCN PAM
gccagcuucuggcccucagg

SEQ ID NO: 8983 - RNA, 20 nt, Artificial Sequence
  targeting sequence with CTCN PAM
ggcugugggaagcuucuucc

SEQ ID NO: 8984 - RNA, 20 nt, Artificial Sequence
  targeting sequence with CTCN PAM
ccccgggaagaagcuuccca

SEQ ID NO: 8985 - RNA, 20 nt, Artificial Sequence
  targeting sequence with CTCN PAM
gccaaguccugggcugguaa

SEQ ID NO: 8986 - RNA, 20 nt, Artificial Sequence
  targeting sequence with CTCN PAM
aagcugggggacacagaacc

SEQ ID NO: 8987 - RNA, 20 nt, Artificial Sequence
  targeting sequence with CTCN PAM
cacuagcuguggugcuugac

SEQ ID NO: 8988 - RNA, 20 nt, Artificial Sequence
  targeting sequence with CTCN PAM
cuagcuguggugcuugacaa

SEQ ID NO: 8989 - RNA, 20 nt, Artificial Sequence
  targeting sequence with CTCN PAM
aggauaagugacuugucaag

SEQ ID NO: 8990 - RNA, 20 nt, Artificial Sequence
  targeting sequence with CTCN PAM
auugccuaaucuuuaaaagg

SEQ ID NO: 8991 - RNA, 20 nt, Artificial Sequence
  targeting sequence with CTCN PAM
cuuuuaaagauuaggcaaug

SEQ ID NO: 8992 - RNA, 20 nt, Artificial Sequence
  targeting sequence with CTCN PAM
guggcagcagauggggagau

SEQ ID NO: 8993 - RNA, 20 nt, Artificial Sequence
  targeting sequence with CTCN PAM
ccaucugcugccacugagcc

SEQ ID NO: 8994 - RNA, 20 nt, Artificial Sequence
  targeting sequence with CTCN PAM
uggucaacagaacuuucccu

SEQ ID NO: 8995 - RNA, 20 nt, Artificial Sequence
  targeting sequence with CTCN PAM
aaaccacagcuccuggggca

SEQ ID NO: 8996 - RNA, 20 nt, Artificial Sequence
  targeting sequence with CTCN PAM
uggggcagaggggaaaauuc

SEQ ID NO: 8997 - RNA, 20 nt, Artificial Sequence
  targeting sequence with CTCN PAM
gccccaggagcugugguuug

SEQ ID NO: 8998 - RNA, 20 nt, Artificial Sequence
  targeting sequence with CTCN PAM
cagcugccugcccacgcuuc

SEQ ID NO: 8999 - RNA, 20 nt, Artificial Sequence
  targeting sequence with CTCN PAM
gacagaagcgugggcaggca

SEQ ID NO: 9000 - RNA, 20 nt, Artificial Sequence
  targeting sequence with CTCN PAM
gcucaguauagcccucuucc

SEQ ID NO: 9001 - RNA, 20 nt, Artificial Sequence
  targeting sequence with CTCN PAM
guauagcccucuuccuuguu

SEQ ID NO: 9002 - RNA, 20 nt, Artificial Sequence
  targeting sequence with CTCN PAM
uccuuguucccugagccuuu

SEQ ID NO: 9003 - RNA, 20 nt, Artificial Sequence
  targeting sequence with CTCN PAM
gggaacaaggaagagggcua

SEQ ID NO: 9004 - RNA, 20 nt, Artificial Sequence
  targeting sequence with CTCN PAM
agggauguugugggguugug

SEQ ID NO: 9005 - RNA, 20 nt, Artificial Sequence
  targeting sequence with CTCN PAM
agaaagucaaaggcucaggg

SEQ ID NO: 9006 - RNA, 20 nt, Artificial Sequence
  targeting sequence with CTCN PAM
aaaacaacuguucuggaaau

SEQ ID NO: 9007 - RNA, 20 nt, Artificial Sequence
  targeting sequence with CTCN PAM
cuauuuccagaacaguuguu

SEQ ID NO: 9008 - RNA, 20 nt, Artificial Sequence
  targeting sequence with CTCN PAM
ggaugggguacucacuauuu

SEQ ID NO: 9009 - RNA, 20 nt, Artificial Sequence
  targeting sequence with CTCN PAM
caggaugggguacucacuau

SEQ ID NO: 9010 - RNA, 20 nt, Artificial Sequence
  targeting sequence with CTCN PAM
ccucucaggaugggguacuc

SEQ ID NO: 9011 - RNA, 20 nt, Artificial Sequence
  targeting sequence with CTCN PAM
gcuuacucaccucucaggau

SEQ ID NO: 9012 - RNA, 20 nt, Artificial Sequence
  targeting sequence with CTCN PAM
agggcuugguucaggugguc

SEQ ID NO: 9013 - RNA, 20 nt, Artificial Sequence
  targeting sequence with CTCN PAM
gguggaaguuuggaacagga

SEQ ID NO: 9014 - RNA, 20 nt, Artificial Sequence
  targeting sequence with CTCN PAM
uguuccaaacuuccaccaga

SEQ ID NO: 9015 - RNA, 20 nt, Artificial Sequence
  targeting sequence with CTCN PAM
ucaaguucauuuauucauuc

SEQ ID NO: 9016 - RNA, 20 nt, Artificial Sequence
  targeting sequence with CTCN PAM
aguucauuuauucauucauu

SEQ ID NO: 9017 - RNA, 20 nt, Artificial Sequence
  targeting sequence with CTCN PAM
ugacuaaaagaaaaggauug

SEQ ID NO: 9018 - RNA, 20 nt, Artificial Sequence
  targeting sequence with CTCN PAM
guuucucaugacuaaaagaa

SEQ ID NO: 9019 - RNA, 20 nt, Artificial Sequence
  targeting sequence with CTCN PAM
gggccucaguuucucaugac

SEQ ID NO: 9020 - RNA, 20 nt, Artificial Sequence
  targeting sequence with CTCN PAM
cugggccucaguuucucaug

SEQ ID NO: 9021 - RNA, 20 nt, Artificial Sequence
  targeting sequence with CTCN PAM
cucugggccucaguuucuca

SEQ ID NO: 9022 - RNA, 20 nt, Artificial Sequence
  targeting sequence with CTCN PAM
ucucucugggccucaguuuc

SEQ ID NO: 9023 - RNA, 20 nt, Artificial Sequence
  targeting sequence with CTCN PAM
acugcacagaguacucuccc

SEQ ID NO: 9024 - RNA, 20 nt, Artificial Sequence
  targeting sequence with CTCN PAM
gugcaguggagugucaguuc

SEQ ID NO: 9025 - RNA, 20 nt, Artificial Sequence
  targeting sequence with CTCN PAM
cccaauucauucaauuuuua

SEQ ID NO: 9026 - RNA, 20 nt, Artificial Sequence
  targeting sequence with CTCN PAM
caauucauucaauuuuuauu

SEQ ID NO: 9027 - RNA, 20 nt, Artificial Sequence
  targeting sequence with CTCN PAM
uacuaaugcuucaaagaccc

SEQ ID NO: 9028 - RNA, 20 nt, Artificial Sequence
  targeting sequence with CTCN PAM
ugacaccaucaucgcugaac

SEQ ID NO: 9029 - RNA, 20 nt, Artificial Sequence
  targeting sequence with CTCN PAM
uaauccuagaauaaaauucu

SEQ ID NO: 9030 - RNA, 20 nt, Artificial Sequence
  targeting sequence with CTCN PAM
guaucuuuguucaugguacc

SEQ ID NO: 9031 - RNA, 20 nt, Artificial Sequence
  targeting sequence with CTCN PAM
gguuuucccagcucuguauc

SEQ ID NO: 9032 - RNA, 20 nt, Artificial Sequence
  targeting sequence with CTCN PAM
uuaucuuccaccucugguuu

SEQ ID NO: 9033 - RNA, 20 nt, Artificial Sequence
  targeting sequence with CTCN PAM
aaaaaaaaagaaaaagaacu

SEQ ID NO: 9034 - RNA, 20 nt, Artificial Sequence
  targeting sequence with CTCN PAM
aucucaaaaaaaaaagaaaa

SEQ ID NO: 9035 - RNA, 20 nt, Artificial Sequence
  targeting sequence with CTCN PAM
uguugcccaggcuggagugc

SEQ ID NO: 9036 - RNA, 20 nt, Artificial Sequence
  targeting sequence with CTCN PAM
agccugggcaacaagagcga

SEQ ID NO: 9037 - RNA, 20 nt, Artificial Sequence
  targeting sequence with CTCN PAM
gcucacugcaacaucugucu

SEQ ID NO: 9038 - RNA, 20 nt, Artificial Sequence
  targeting sequence with CTCN PAM
cugcaacaucugucucccgg

SEQ ID NO: 9039 - RNA, 20 nt, Artificial Sequence
  targeting sequence with CTCN PAM
cggguucaagugguucuccu

SEQ ID NO: 9040 - RNA, 20 nt, Artificial Sequence
  targeting sequence with CTCN PAM
ugccucagccucccaagaag

SEQ ID NO: 9041 - RNA, 20 nt, Artificial Sequence
  targeting sequence with CTCN PAM
gccucccaagaagcugggau

SEQ ID NO: 9042 - RNA, 20 nt, Artificial Sequence
  targeting sequence with CTCN PAM
caagaagcugggauuacagg

SEQ ID NO: 9043 - RNA, 20 nt, Artificial Sequence
  targeting sequence with CTCN PAM
acuaaaaauacaaaaauuag

SEQ ID NO: 9044 - RNA, 20 nt, Artificial Sequence
  targeting sequence with CTCN PAM
ugaccuccucaguggauccg

SEQ ID NO: 9045 - RNA, 20 nt, Artificial Sequence
  targeting sequence with CTCN PAM
ucaguggauccgaggaggug

SEQ ID NO: 9046 - RNA, 20 nt, Artificial Sequence
  targeting sequence with CTCN PAM
guggauccgaggaggugauc

SEQ ID NO: 9047 - RNA, 20 nt, Artificial Sequence
  targeting sequence with CTCN PAM
gauccacugaggaggucagg

SEQ ID NO: 9048 - RNA, 20 nt, Artificial Sequence
  targeting sequence with CTCN PAM
ucggauccacugaggagguc

SEQ ID NO: 9049 - RNA, 20 nt, Artificial Sequence
  targeting sequence with CTCN PAM
cgccucagccucccaaagug

SEQ ID NO: 9050 - RNA, 20 nt, Artificial Sequence
  targeting sequence with CTCN PAM
gccucccaaagugcucgaau

SEQ ID NO: 9051 - RNA, 20 nt, Artificial Sequence
  targeting sequence with CTCN PAM
caaagugcucgaauuacagg

SEQ ID NO: 9052 - RNA, 20 nt, Artificial Sequence
  targeting sequence with CTCN PAM
aauuacaggugugagccacc

SEQ ID NO: 9053 - RNA, 20 nt, Artificial Sequence
  targeting sequence with CTCN PAM
caccuguaauucgagcacuu

SEQ ID NO: 9054 - RNA, 20 nt, Artificial Sequence
  targeting sequence with CTCN PAM
acaguucuuuauccaccguc

SEQ ID NO: 9055 - RNA, 20 nt, Artificial Sequence
  targeting sequence with CTCN PAM
ugucaguucacgucaggugc

SEQ ID NO: 9056 - RNA, 20 nt, Artificial Sequence
  targeting sequence with CTCN PAM
agauucuuccaagcagacuc

SEQ ID NO: 9057 - RNA, 20 nt, Artificial Sequence
  targeting sequence with CTCN PAM
gauugcccauuacugccuuu

SEQ ID NO: 9058 - RNA, 20 nt, Artificial Sequence
  targeting sequence with CTCN PAM
gaacuuguuuggauuuuaga

SEQ ID NO: 9059 - RNA, 20 nt, Artificial Sequence
  targeting sequence with CTCN PAM
guucuacucugacuggaguc

SEQ ID NO: 9060 - RNA, 20 nt, Artificial Sequence
  targeting sequence with CTCN PAM
gacuggaguccaagaugcau

SEQ ID NO: 9061 - RNA, 20 nt, Artificial Sequence
  targeting sequence with CTCN PAM
agucagaguagaacagaguc

SEQ ID NO: 9062 - RNA, 20 nt, Artificial Sequence
  targeting sequence with CTCN PAM
guauauaugcaucuuggacu

SEQ ID NO: 9063 - RNA, 20 nt, Artificial Sequence
  targeting sequence with CTCN PAM
accuaccuugcagccccauc

SEQ ID NO: 9064 - RNA, 20 nt, Artificial Sequence
  targeting sequence with CTCN PAM
uuggccccuaccucaaccua

SEQ ID NO: 9065 - RNA, 20 nt, Artificial Sequence
  targeting sequence with CTCN PAM
uccuuggccccuaccucaac

SEQ ID NO: 9066 - RNA, 20 nt, Artificial Sequence
  targeting sequence with CTCN PAM
augcuccuccuuggccccua

SEQ ID NO: 9067 - RNA, 20 nt, Artificial Sequence
  targeting sequence with CTCN PAM
ugaaucaaguccaaacucca

SEQ ID NO: 9068 - RNA, 20 nt, Artificial Sequence
  targeting sequence with CTCN PAM
ccacagccucaugaaucaag

SEQ ID NO: 9069 - RNA, 20 nt, Artificial Sequence
  targeting sequence with CTCN PAM
ggcagacauaccugcuuaag

SEQ ID NO: 9070 - RNA, 20 nt, Artificial Sequence
  targeting sequence with CTCN PAM
caggcagacauaccugcuua

SEQ ID NO: 9071 - RNA, 20 nt, Artificial Sequence
  targeting sequence with CTCN PAM
aacugcucucaggcagacau

SEQ ID NO: 9072 - RNA, 20 nt, Artificial Sequence
  targeting sequence with CTCN PAM
ugucugcuccaacugcucuc

SEQ ID NO: 9073 - RNA, 20 nt, Artificial Sequence
  targeting sequence with CTCN PAM
aaaucucauguggaaauuug

SEQ ID NO: 9074 - RNA, 20 nt, Artificial Sequence
  targeting sequence with CTCN PAM
uguggaaauuugguccucag

SEQ ID NO: 9075 - RNA, 20 nt, Artificial Sequence
  targeting sequence with CTCN PAM
guguuggaaguggggccuaa

SEQ ID NO: 9076 - RNA, 20 nt, Artificial Sequence
  targeting sequence with CTCN PAM
cauuaggccccacuuccaac

SEQ ID NO: 9077 - RNA, 20 nt, Artificial Sequence
  targeting sequence with CTCN PAM
cccaugacccaaacaccucc

SEQ ID NO: 9078 - RNA, 20 nt, Artificial Sequence
  targeting sequence with CTCN PAM
uuaucacaaggacggcacca

SEQ ID NO: 9079 - RNA, 20 nt, Artificial Sequence
  targeting sequence with CTCN PAM
cgcuaugauuucccuugaag

SEQ ID NO: 9080 - RNA, 20 nt, Artificial Sequence
  targeting sequence with CTCN PAM
uuuuaauaaucagccuucaa

SEQ ID NO: 9081 - RNA, 20 nt, Artificial Sequence
  targeting sequence with CTCN PAM
cucucuucucucuugcuucu

SEQ ID NO: 9082 - RNA, 20 nt, Artificial Sequence
  targeting sequence with CTCN PAM
cuucucucuugcuucuucuc

SEQ ID NO: 9083 - RNA, 20 nt, Artificial Sequence
  targeting sequence with CTCN PAM
ucucucuugcuucuucucuu

SEQ ID NO: 9084 - RNA, 20 nt, Artificial Sequence
  targeting sequence with CTCN PAM
cuugcuucuucucuugccau

SEQ ID NO: 9085 - RNA, 20 nt, Artificial Sequence
  targeting sequence with CTCN PAM
ugcuucuucucuugccaugu

SEQ ID NO: 9086 - RNA, 20 nt, Artificial Sequence
  targeting sequence with CTCN PAM
ugccaugugauugaucucug

SEQ ID NO: 9087 - RNA, 20 nt, Artificial Sequence
  targeting sequence with CTCN PAM
gcacauguaggcuccccuuc

SEQ ID NO: 9088 - RNA, 20 nt, Artificial Sequence
  targeting sequence with CTCN PAM
ccuucaccuucugccaucag

SEQ ID NO: 9089 - RNA, 20 nt, Artificial Sequence
  targeting sequence with CTCN PAM
ccagaagcagaugcuggugc

SEQ ID NO: 9090 - RNA, 20 nt, Artificial Sequence
  targeting sequence with CTCN PAM
aggaagcauggcaccagcau

SEQ ID NO: 9091 - RNA, 20 nt, Artificial Sequence
  targeting sequence with CTCN PAM
ccaggaagcauggcaccagc

SEQ ID NO: 9092 - RNA, 20 nt, Artificial Sequence
  targeting sequence with CTCN PAM
ugauucugcaagcucuccag

SEQ ID NO: 9093 - RNA, 20 nt, Artificial Sequence
  targeting sequence with CTCN PAM
ccuucagguauuccuuuaua

SEQ ID NO: 9094 - RNA, 20 nt, Artificial Sequence
  targeting sequence with CTCN PAM
cucuuuaagaaguguugccu

SEQ ID NO: 9095 - RNA, 20 nt, Artificial Sequence
  targeting sequence with CTCN PAM
cuuuaagaaguguugccuuu

SEQ ID NO: 9096 - RNA, 20 nt, Artificial Sequence
  targeting sequence with CTCN PAM
uuaagaaguguugccuuugc

SEQ ID NO: 9097 - RNA, 20 nt, Artificial Sequence
  targeting sequence with CTCN PAM
cuuagucaucccuucugccu

SEQ ID NO: 9098 - RNA, 20 nt, Artificial Sequence
  targeting sequence with CTCN PAM
acaaaugcaggcagaaggga

SEQ ID NO: 9099 - RNA, 20 nt, Artificial Sequence
  targeting sequence with CTCN PAM
cauccagaugcucuacaaau

SEQ ID NO: 9100 - RNA, 20 nt, Artificial Sequence
  targeting sequence with CTCN PAM
ugacuuucccagcaggccua

SEQ ID NO: 9101 - RNA, 20 nt, Artificial Sequence
  targeting sequence with CTCN PAM
acaauacagcagagguaucu

SEQ ID NO: 9102 - RNA, 20 nt, Artificial Sequence
  targeting sequence with CTCN PAM
gcuguauuguagagaccaca

SEQ ID NO: 9103 - RNA, 20 nt, Artificial Sequence
  targeting sequence with CTCN PAM
gauaccucugcuguauugua

SEQ ID NO: 9104 - RNA, 20 nt, Artificial Sequence
  targeting sequence with CTCN PAM
gagagguugagugacuugcu

SEQ ID NO: 9105 - RNA, 20 nt, Artificial Sequence
  targeting sequence with CTCN PAM
gagccucagauaccucugcu

SEQ ID NO: 9106 - RNA, 20 nt, Artificial Sequence
  targeting sequence with CTCN PAM
cggagccucagauaccucug

SEQ ID NO: 9107 - RNA, 20 nt, Artificial Sequence
  targeting sequence with CTCN PAM
accucucggagccucagaua

SEQ ID NO: 9108 - RNA, 20 nt, Artificial Sequence
  targeting sequence with CTCN PAM
uggcugcacaaccaguaaau

SEQ ID NO: 9109 - RNA, 20 nt, Artificial Sequence
  targeting sequence with CTCN PAM
aauauuuacugguugugcag

SEQ ID NO: 9110 - RNA, 20 nt, Artificial Sequence
  targeting sequence with CTCN PAM
aaagcccaugauuuuuuccc

SEQ ID NO: 9111 - RNA, 20 nt, Artificial Sequence
  targeting sequence with CTCN PAM
auuuauucugacuggggcau

SEQ ID NO: 9112 - RNA, 20 nt, Artificial Sequence
  targeting sequence with CTCN PAM
cccaugccccagucagaaua

SEQ ID NO: 9113 - RNA, 20 nt, Artificial Sequence
  targeting sequence with CTCN PAM
ugguggcccugcccaaaggc

SEQ ID NO: 9114 - RNA, 20 nt, Artificial Sequence
  targeting sequence with CTCN PAM
acgggccuggucgcuccugg

SEQ ID NO: 9115 - RNA, 20 nt, Artificial Sequence
  targeting sequence with CTCN PAM
cuacgggccuggucgcuccu

SEQ ID NO: 9116 - RNA, 20 nt, Artificial Sequence
  targeting sequence with CTCN PAM
guaccugcacccagcucucu

SEQ ID NO: 9117 - RNA, 20 nt, Artificial Sequence
  targeting sequence with CTCN PAM
acaacagguuuuccucugua

SEQ ID NO: 9118 - RNA, 20 nt, Artificial Sequence
  targeting sequence with CTCN PAM
uauaggccaacuauuauuau

SEQ ID NO: 9119 - RNA, 20 nt, Artificial Sequence
  targeting sequence with CTCN PAM
guugugucucuuuuguugua

SEQ ID NO: 9120 - RNA, 20 nt, Artificial Sequence
  targeting sequence with CTCN PAM
uuuguuguaauuuguaagua

SEQ ID NO: 9121 - RNA, 20 nt, Artificial Sequence
  targeting sequence with CTCN PAM
ccccuacuuacaaauuacaa

SEQ ID NO: 9122 - RNA, 20 nt, Artificial Sequence
  targeting sequence with CTCN PAM
uugcauggggccaggauccg

SEQ ID NO: 9123 - RNA, 20 nt, Artificial Sequence
  targeting sequence with CTCN PAM
acggauccuggccccaugca

SEQ ID NO: 9124 - RNA, 20 nt, Artificial Sequence
  targeting sequence with CTCN PAM
uucagcaccaccacguaggu

SEQ ID NO: 9125 - RNA, 20 nt, Artificial Sequence
  targeting sequence with CTCN PAM
uccuucagcaccaccacgua

SEQ ID NO: 9126 - RNA, 20 nt, Artificial Sequence
  targeting sequence with CTCN PAM
cgcagucagagcgcacugcc

SEQ ID NO: 9127 - RNA, 20 nt, Artificial Sequence
  targeting sequence with CTCN PAM
cagucagagcgcacugcccg

SEQ ID NO: 9128 - RNA, 20 nt, Artificial Sequence
  targeting sequence with CTCN PAM
gacugcgagaggugggucuc

SEQ ID NO: 9129 - RNA, 20 nt, Artificial Sequence
  targeting sequence with CTCN PAM
ccaagauccugcaugucuuc

SEQ ID NO: 9130 - RNA, 20 nt, Artificial Sequence
  targeting sequence with CTCN PAM
ucuucaccaggaagccagga

SEQ ID NO: 9131 - RNA, 20 nt, Artificial Sequence
  targeting sequence with CTCN PAM
agcaggucgccacucaucuu

SEQ ID NO: 9132 - RNA, 20 nt, Artificial Sequence
  targeting sequence with CTCN PAM
ccagcuccagcaggucgcca

SEQ ID NO: 9133 - RNA, 20 nt, Artificial Sequence
  targeting sequence with CTCN PAM
auacauacuugcuguccccu

SEQ ID NO: 9134 - RNA, 20 nt, Artificial Sequence
  targeting sequence with CTCN PAM
ucuuucaaaugaagauagac

SEQ ID NO: 9135 - RNA, 20 nt, Artificial Sequence
  targeting sequence with CTCN PAM
ucgucuuucaaaugaagaua

SEQ ID NO: 9136 - RNA, 20 nt, Artificial Sequence
  targeting sequence with CTCN PAM
gaacuucagucuccucgucu

SEQ ID NO: 9137 - RNA, 20 nt, Artificial Sequence
  targeting sequence with CTCN PAM
accccuagcugucugugugg

SEQ ID NO: 9138 - RNA, 20 nt, Artificial Sequence
  targeting sequence with CTCN PAM
acugaacaucccagggccuu

SEQ ID NO: 9139 - RNA, 20 nt, Artificial Sequence
  targeting sequence with CTCN PAM
ggcuccacugaacaucccag

SEQ ID NO: 9140 - RNA, 20 nt, Artificial Sequence
  targeting sequence with CTCN PAM
aggguccaaaauuccuuuga

SEQ ID NO: 9141 - RNA, 20 nt, Artificial Sequence
  targeting sequence with CTCN PAM
ggauagcaacagcuucaaag

SEQ ID NO: 9142 - RNA, 20 nt, Artificial Sequence
  targeting sequence with CTCN PAM
ucccuccuggaugucacauc

SEQ ID NO: 9143 - RNA, 20 nt, Artificial Sequence
  targeting sequence with CTCN PAM
cuccuggaugucacaucuuc

SEQ ID NO: 9144 - RNA, 20 nt, Artificial Sequence
  targeting sequence with CTCN PAM
uggaugucacaucuucggug

SEQ ID NO: 9145 - RNA, 20 nt, Artificial Sequence
  targeting sequence with CTCN PAM
accgaagaugugacauccag

SEQ ID NO: 9146 - RNA, 20 nt, Artificial Sequence
  targeting sequence with CTCN PAM
ucacccuggcccuagugcuu

SEQ ID NO: 9147 - RNA, 20 nt, Artificial Sequence
  targeting sequence with CTCN PAM
cccuggcccuagugcuucaa

SEQ ID NO: 9148 - RNA, 20 nt, Artificial Sequence
  targeting sequence with CTCN PAM
uuuccuggccucuaacuuga

SEQ ID NO: 9149 - RNA, 20 nt, Artificial Sequence
  targeting sequence with CTCN PAM
aacuugaugagagcgugugu

SEQ ID NO: 9150 - RNA, 20 nt, Artificial Sequence
  targeting sequence with CTCN PAM
ucaaguuagaggccaggaaa

SEQ ID NO: 9151 - RNA, 20 nt, Artificial Sequence
  targeting sequence with CTCN PAM
caucaaguuagaggccagga

SEQ ID NO: 9152 - RNA, 20 nt, Artificial Sequence
  targeting sequence with CTCN PAM
acauggcaggcggugcuucu

SEQ ID NO: 9153 - RNA, 20 nt, Artificial Sequence
  targeting sequence with CTCN PAM
ugcagacagugaggccccac

SEQ ID NO: 9154 - RNA, 20 nt, Artificial Sequence
  targeting sequence with CTCN PAM
cugucugcaggaggcuaaga

SEQ ID NO: 9155 - RNA, 20 nt, Artificial Sequence
  targeting sequence with CTCN PAM
gacccugcccauuacacgcu

SEQ ID NO: 9156 - RNA, 20 nt, Artificial Sequence
  targeting sequence with CTCN PAM
agacucugacccugcccauu

SEQ ID NO: 9157 - RNA, 20 nt, Artificial Sequence
  targeting sequence with CTCN PAM
uagcugcacugcacugcugc

SEQ ID NO: 9158 - RNA, 20 nt, Artificial Sequence
  targeting sequence with CTCN PAM
gcauaccguggcugaacagc

SEQ ID NO: 9159 - RNA, 20 nt, Artificial Sequence
  targeting sequence with CTCN PAM
uaccaaggccuguggcgcca

SEQ ID NO: 9160 - RNA, 20 nt, Artificial Sequence
  targeting sequence with CTCN PAM
acuuagacuacggguuucca

SEQ ID NO: 9161 - RNA, 20 nt, Artificial Sequence
  targeting sequence with CTCN PAM
ucuacuuagacuacggguuu

SEQ ID NO: 9162 - RNA, 20 nt, Artificial Sequence
  targeting sequence with CTCN PAM
acacacguuuaccaagugcc

SEQ ID NO: 9163 - RNA, 20 nt, Artificial Sequence
  targeting sequence with CTCN PAM
gcagcacacaguaggcacuu

SEQ ID NO: 9164 - RNA, 20 nt, Artificial Sequence
  targeting sequence with CTCN PAM
ggccuuucccuugagcuuac

SEQ ID NO: 9165 - RNA, 20 nt, Artificial Sequence
  targeting sequence with CTCN PAM
agggaaaggccugagcugug

SEQ ID NO: 9166 - RNA, 20 nt, Artificial Sequence
  targeting sequence with CTCN PAM
ugaacuguaagcucaaggga

SEQ ID NO: 9167 - RNA, 20 nt, Artificial Sequence
  targeting sequence with CTCN PAM
uccugaacuguaagcucaag

SEQ ID NO: 9168 - RNA, 20 nt, Artificial Sequence
  targeting sequence with CTCN PAM
ccuccugaacuguaagcuca

SEQ ID NO: 9169 - RNA, 20 nt, Artificial Sequence
  targeting sequence with CTCN PAM
gccuuggggagagacgaaga

SEQ ID NO: 9170 - RNA, 20 nt, Artificial Sequence
  targeting sequence with CTCN PAM
ccaaggcugagcacauuguc

SEQ ID NO: 9171 - RNA, 20 nt, Artificial Sequence
  targeting sequence with CTCN PAM
ccccaaggcugagcacauug

SEQ ID NO: 9172 - RNA, 20 nt, Artificial Sequence
  targeting sequence with CTCN PAM
ugccugucaucuggugcuau

SEQ ID NO: 9173 - RNA, 20 nt, Artificial Sequence
  targeting sequence with CTCN PAM
gaggagaguaggccaagcag

SEQ ID NO: 9174 - RNA, 20 nt, Artificial Sequence
  targeting sequence with CTCN PAM
gagcagcugcccuggccugu

SEQ ID NO: 9175 - RNA, 20 nt, Artificial Sequence
  targeting sequence with CTCN PAM
ucugagcagcugcccuggcc

SEQ ID NO: 9176 - RNA, 20 nt, Artificial Sequence
  targeting sequence with CTCN PAM
ccucugagcagcugcccugg

SEQ ID NO: 9177 - RNA, 20 nt, Artificial Sequence
  targeting sequence with CTCN PAM
auggcaaaugccugcagccu

SEQ ID NO: 9178 - RNA, 20 nt, Artificial Sequence
  targeting sequence with CTCN PAM
cgauggcaaaugccugcagc

SEQ ID NO: 9179 - RNA, 20 nt, Artificial Sequence
  targeting sequence with CTCN PAM
aacccaggcugguaugaugc

SEQ ID NO: 9180 - RNA, 20 nt, Artificial Sequence
  targeting sequence with CTCN PAM
ggguuagacagccaauaagg

SEQ ID NO: 9181 - RNA, 20 nt, Artificial Sequence
  targeting sequence with CTCN PAM
cugagccucauuccucuauc

SEQ ID NO: 9182 - RNA, 20 nt, Artificial Sequence
  targeting sequence with CTCN PAM
gagccucauuccucuaucug

SEQ ID NO: 9183 - RNA, 20 nt, Artificial Sequence
  targeting sequence with CTCN PAM
gagaggugaagggauuugcu

SEQ ID NO: 9184 - RNA, 20 nt, Artificial Sequence
  targeting sequence with CTCN PAM
uuccucuaucuguaaaccag

SEQ ID NO: 9185 - RNA, 20 nt, Artificial Sequence
  targeting sequence with CTCN PAM
aucuguaaaccaguuauaau

SEQ ID NO: 9186 - RNA, 20 nt, Artificial Sequence
  targeting sequence with CTCN PAM
uuuaguccuuaaaugaaugu

SEQ ID NO: 9187 - RNA, 20 nt, Artificial Sequence
  targeting sequence with CTCN PAM
cugaagugggggcagguuaa

SEQ ID NO: 9188 - RNA, 20 nt, Artificial Sequence
  targeting sequence with CTCN PAM
ggggauacgaaggcauccag

SEQ ID NO: 9189 - RNA, 20 nt, Artificial Sequence
  targeting sequence with CTCN PAM
ugccacaacuagucccugga

SEQ ID NO: 9190 - RNA, 20 nt, Artificial Sequence
  targeting sequence with CTCN PAM
uuacccuucagaccuaagug

SEQ ID NO: 9191 - RNA, 20 nt, Artificial Sequence
  targeting sequence with CTCN PAM
ccuuacccuucagaccuaag

SEQ ID NO: 9192 - RNA, 20 nt, Artificial Sequence
  targeting sequence with CTCN PAM
gcccaguuggagccgguggc

SEQ ID NO: 9193 - RNA, 20 nt, Artificial Sequence
  targeting sequence with CTCN PAM
aacugggcagagggaaagcu

SEQ ID NO: 9194 - RNA, 20 nt, Artificial Sequence
  targeting sequence with CTCN PAM
augccaccggcuccaacugg

SEQ ID NO: 9195 - RNA, 20 nt, Artificial Sequence
  targeting sequence with CTCN PAM
uccaugccaccggcuccaac

SEQ ID NO: 9196 - RNA, 20 nt, Artificial Sequence
  targeting sequence with CTCN PAM
ccuccaugccaccggcucca

SEQ ID NO: 9197 - RNA, 20 nt, Artificial Sequence
  targeting sequence with CTCN PAM
ggugauuccccacaggcagc

SEQ ID NO: 9198 - RNA, 20 nt, Artificial Sequence
  targeting sequence with CTCN PAM
cugcgcauggcagcggugaa

SEQ ID NO: 9199 - RNA, 20 nt, Artificial Sequence
  targeting sequence with CTCN PAM
ugacucccugcgcauggcag

SEQ ID NO: 9200 - RNA, 20 nt, Artificial Sequence
  targeting sequence with CTCN PAM
cuaccuccugacucccugcg

SEQ ID NO: 9201 - RNA, 20 nt, Artificial Sequence
  targeting sequence with CTCN PAM
cucccuaccuccugacuccc

SEQ ID NO: 9202 - RNA, 20 nt, Artificial Sequence
  targeting sequence with CTCN PAM
aaaaaaaaaaaaaauggugu

SEQ ID NO: 9203 - RNA, 20 nt, Artificial Sequence
  targeting sequence with CTCN PAM
guugcccagacuggagugca

SEQ ID NO: 9204 - RNA, 20 nt, Artificial Sequence
  targeting sequence with CTCN PAM
agucugggcaacagagucuc

SEQ ID NO: 9205 - RNA, 20 nt, Artificial Sequence
  targeting sequence with CTCN PAM
gccucccggguucaagcuca

SEQ ID NO: 9206 - RNA, 20 nt, Artificial Sequence
  targeting sequence with CTCN PAM
cggguucaagcucacugcaa

SEQ ID NO: 9207 - RNA, 20 nt, Artificial Sequence
  targeting sequence with CTCN PAM
cugcaaccucugccucccgg

SEQ ID NO: 9208 - RNA, 20 nt, Artificial Sequence
  targeting sequence with CTCN PAM
gccucccggguucaagcgau

SEQ ID NO: 9209 - RNA, 20 nt, Artificial Sequence
  targeting sequence with CTCN PAM
cggguucaagcgauucuccu

SEQ ID NO: 9210 - RNA, 20 nt, Artificial Sequence
  targeting sequence with CTCN PAM
ugccucagccucccgaguag

SEQ ID NO: 9211 - RNA, 20 nt, Artificial Sequence
  targeting sequence with CTCN PAM
gccucccgaguagcugggac

SEQ ID NO: 9212 - RNA, 20 nt, Artificial Sequence
  targeting sequence with CTCN PAM
cgaguagcugggacuacagg

SEQ ID NO: 9213 - RNA, 20 nt, Artificial Sequence
  targeting sequence with CTCN PAM
ggaggcugaggcaggagaau

SEQ ID NO: 9214 - RNA, 20 nt, Artificial Sequence
  targeting sequence with CTCN PAM
auuaaaaauacaaaaauuag

SEQ ID NO: 9215 - RNA, 20 nt, Artificial Sequence
  targeting sequence with CTCN PAM
aacucucgaccucaggugau

SEQ ID NO: 9216 - RNA, 20 nt, Artificial Sequence
  targeting sequence with CTCN PAM
cgaccucaggugauccccca

SEQ ID NO: 9217 - RNA, 20 nt, Artificial Sequence
  targeting sequence with CTCN PAM
accucaggugaucccccacc

SEQ ID NO: 9218 - RNA, 20 nt, Artificial Sequence
  targeting sequence with CTCN PAM
ggugaucccccaccucggcc

SEQ ID NO: 9219 - RNA, 20 nt, Artificial Sequence
  targeting sequence with CTCN PAM
gccucccaaagugcugggau

SEQ ID NO: 9220 - RNA, 20 nt, Artificial Sequence
  targeting sequence with CTCN PAM
caaagugcugggauuacagg

SEQ ID NO: 9221 - RNA, 20 nt, Artificial Sequence
  targeting sequence with CTCN PAM
cgccuguaaucccagcacuu

SEQ ID NO: 9222 - RNA, 20 nt, Artificial Sequence
  targeting sequence with CTCN PAM
cagcugcugaugcacucuug

SEQ ID NO: 9223 - RNA, 20 nt, Artificial Sequence
  targeting sequence with CTCN PAM
uguccuucuaacuccugcua

SEQ ID NO: 9224 - RNA, 20 nt, Artificial Sequence
  targeting sequence with CTCN PAM
ugcuagugccucccauuggc

SEQ ID NO: 9225 - RNA, 20 nt, Artificial Sequence
  targeting sequence with CTCN PAM
cauuggcugagcccaacugg

SEQ ID NO: 9226 - RNA, 20 nt, Artificial Sequence
  targeting sequence with CTCN PAM
gccaaugggaggcacuagca

SEQ ID NO: 9227 - RNA, 20 nt, Artificial Sequence
  targeting sequence with CTCN PAM
cuugcaaagcuuccaguugg

SEQ ID NO: 9228 - RNA, 20 nt, Artificial Sequence
  targeting sequence with CTCN PAM
gugcaaacugcagcaccagc

SEQ ID NO: 9229 - RNA, 20 nt, Artificial Sequence
  targeting sequence with CTCN PAM
agccugcucagugcaaacug

SEQ ID NO: 9230 - RNA, 20 nt, Artificial Sequence
  targeting sequence with CTCN PAM
agccuucuccagccugcuca

SEQ ID NO: 9231 - RNA, 20 nt, Artificial Sequence
  targeting sequence with CTCN PAM
augccuaaaucaugacauaa

SEQ ID NO: 9232 - RNA, 20 nt, Artificial Sequence
  targeting sequence with CTCN PAM
ggcccuggacuccaugccua

SEQ ID NO: 9233 - RNA, 20 nt, Artificial Sequence
  targeting sequence with CTCN PAM
auguccauccugcccagagc

SEQ ID NO: 9234 - RNA, 20 nt, Artificial Sequence
  targeting sequence with CTCN PAM
gggcaggauggacauggagu

SEQ ID NO: 9235 - RNA, 20 nt, Artificial Sequence
  targeting sequence with CTCN PAM
cagacaagaugucaaguuca

SEQ ID NO: 9236 - RNA, 20 nt, Artificial Sequence
  targeting sequence with CTCN PAM
augccagaccguguugcagg

SEQ ID NO: 9237 - RNA, 20 nt, Artificial Sequence
  targeting sequence with CTCN PAM
cauaucccugcaacacgguc

SEQ ID NO: 9238 - RNA, 20 nt, Artificial Sequence
  targeting sequence with CTCN PAM
cagccugaucaaggagcgag

SEQ ID NO: 9239 - RNA, 20 nt, Artificial Sequence
  targeting sequence with CTCN PAM
uugaucaggcugggagccca

SEQ ID NO: 9240 - RNA, 20 nt, Artificial Sequence
  targeting sequence with CTCN PAM
cuccuugaucaggcugggag

SEQ ID NO: 9241 - RNA, 20 nt, Artificial Sequence
  targeting sequence with CTCN PAM
ggcuccuagucuguccuccg

SEQ ID NO: 9242 - RNA, 20 nt, Artificial Sequence
  targeting sequence with CTCN PAM
uagucuguccuccggggcac

SEQ ID NO: 9243 - RNA, 20 nt, Artificial Sequence
  targeting sequence with CTCN PAM
ggggcacuagcagggacaag

SEQ ID NO: 9244 - RNA, 20 nt, Artificial Sequence
  targeting sequence with CTCN PAM
caccuugucccugcuagugc

SEQ ID NO: 9245 - RNA, 20 nt, Artificial Sequence
  targeting sequence with CTCN PAM
gcuuaagccauuuggacagc

SEQ ID NO: 9246 - RNA, 20 nt, Artificial Sequence
  targeting sequence with CTCN PAM
cuggcuucugcaggccuuga

SEQ ID NO: 9247 - RNA, 20 nt, Artificial Sequence
  targeting sequence with CTCN PAM
ggcuucugcaggccuugaag

SEQ ID NO: 9248 - RNA, 20 nt, Artificial Sequence
  targeting sequence with CTCN PAM
auguagucgacauggggcaa

SEQ ID NO: 9249 - RNA, 20 nt, Artificial Sequence
  targeting sequence with CTCN PAM
ucgauguagucgacaugggg

SEQ ID NO: 9250 - RNA, 20 nt, Artificial Sequence
  targeting sequence with CTCN PAM
ucugucuuugcccagagcau

SEQ ID NO: 9251 - RNA, 20 nt, Artificial Sequence
  targeting sequence with CTCN PAM
gucuuugcccagagcauccc

SEQ ID NO: 9252 - RNA, 20 nt, Artificial Sequence
  targeting sequence with CTCN PAM
gggcaaagacagaggagucc

SEQ ID NO: 9253 - RNA, 20 nt, Artificial Sequence
  targeting sequence with CTCN PAM
agguuccacgggaugcucug

SEQ ID NO: 9254 - RNA, 20 nt, Artificial Sequence
  targeting sequence with CTCN PAM
acgguaccgggcggaugaau

SEQ ID NO: 9255 - RNA, 20 nt, Artificial Sequence
  targeting sequence with CTCN PAM
gaugggguggggcagggcac

SEQ ID NO: 9256 - RNA, 20 nt, Artificial Sequence
  targeting sequence with CTCN PAM
gcccuggccuggccucccug

SEQ ID NO: 9257 - RNA, 20 nt, Artificial Sequence
  targeting sequence with CTCN PAM
cugcuggugguuuccacuuc

SEQ ID NO: 9258 - RNA, 20 nt, Artificial Sequence
  targeting sequence with CTCN PAM
gggggcuuugggacucagca

SEQ ID NO: 9259 - RNA, 20 nt, Artificial Sequence
  targeting sequence with CTCN PAM
gcaccuccacugaccccuuu

SEQ ID NO: 9260 - RNA, 20 nt, Artificial Sequence
  targeting sequence with CTCN PAM
acugaccccuuuuuuucugu

SEQ ID NO: 9261 - RNA, 20 nt, Artificial Sequence
  targeting sequence with CTCN PAM
uuuccuucuuuucucuuguu

SEQ ID NO: 9262 - RNA, 20 nt, Artificial Sequence
  targeting sequence with CTCN PAM
uguuuuccuuuucucaccau

SEQ ID NO: 9263 - RNA, 20 nt, Artificial Sequence
  targeting sequence with CTCN PAM
ccauuuggaauggcccagca

SEQ ID NO: 9264 - RNA, 20 nt, Artificial Sequence
  targeting sequence with CTCN PAM
uuccaagguaagugcagccu

SEQ ID NO: 9265 - RNA, 20 nt, Artificial Sequence
  targeting sequence with CTCN PAM
accuagggcccccaggccuc

SEQ ID NO: 9266 - RNA, 20 nt, Artificial Sequence
  targeting sequence with CTCN PAM
auaacucccagugcccugca

SEQ ID NO: 9267 - RNA, 20 nt, Artificial Sequence
  targeting sequence with CTCN PAM
cagugcccugcagacuggac

SEQ ID NO: 9268 - RNA, 20 nt, Artificial Sequence
  targeting sequence with CTCN PAM
gccuaccuuccuguuuugcu

SEQ ID NO: 9269 - RNA, 20 nt, Artificial Sequence
  targeting sequence with CTCN PAM
accugccuccagcuccguuu

SEQ ID NO: 9270 - RNA, 20 nt, Artificial Sequence
  targeting sequence with CTCN PAM
agcuccguuuggcuuccugg

SEQ ID NO: 9271 - RNA, 20 nt, Artificial Sequence
  targeting sequence with CTCN PAM
guuuggcuuccuggggcucc

SEQ ID NO: 9272 - RNA, 20 nt, Artificial Sequence
  targeting sequence with CTCN PAM
cugccugggccacuuugugu

SEQ ID NO: 9273 - RNA, 20 nt, Artificial Sequence
  targeting sequence with CTCN PAM
aggccuuucuuuccacuguu

SEQ ID NO: 9274 - RNA, 20 nt, Artificial Sequence
  targeting sequence with CTCN PAM
gccugguguggccuggcuau

SEQ ID NO: 9275 - RNA, 20 nt, Artificial Sequence
  targeting sequence with CTCN PAM
cuuccauagccaggccacac

SEQ ID NO: 9276 - RNA, 20 nt, Artificial Sequence
  targeting sequence with CTCN PAM
cucccuuccauagccaggcc

SEQ ID NO: 9277 - RNA, 20 nt, Artificial Sequence
  targeting sequence with CTCN PAM
ucccucccuuccauagccag

SEQ ID NO: 9278 - RNA, 20 nt, Artificial Sequence
  targeting sequence with CTCN PAM
uccucccucccuuccauagc

SEQ ID NO: 9279 - RNA, 20 nt, Artificial Sequence
  targeting sequence with CTCN PAM
agaugcaccuggccugagga

SEQ ID NO: 9280 - RNA, 20 nt, Artificial Sequence
  targeting sequence with CTCN PAM
ggccaggugcaucuagaguc

SEQ ID NO: 9281 - RNA, 20 nt, Artificial Sequence
  targeting sequence with CTCN PAM
ucaggccaggugcaucuaga

SEQ ID NO: 9282 - RNA, 20 nt, Artificial Sequence
  targeting sequence with CTCN PAM
ccucaggccaggugcaucua

SEQ ID NO: 9283 - RNA, 20 nt, Artificial Sequence
  targeting sequence with CTCN PAM
aacuuaacacaguccaacua

SEQ ID NO: 9284 - RNA, 20 nt, Artificial Sequence
  targeting sequence with CTCN PAM
caccaugggcaccucaaacu

SEQ ID NO: 9285 - RNA, 20 nt, Artificial Sequence
  targeting sequence with CTCN PAM
agaccucacaccaugggcac

SEQ ID NO: 9286 - RNA, 20 nt, Artificial Sequence
  targeting sequence with CTCN PAM
gcgcagagaugaugcaaugu

SEQ ID NO: 9287 - RNA, 20 nt, Artificial Sequence
  targeting sequence with CTCN PAM
gcgcugagcuccagaccuca

SEQ ID NO: 9288 - RNA, 20 nt, Artificial Sequence
  targeting sequence with CTCN PAM
gcguccuggcaccauguugc

SEQ ID NO: 9289 - RNA, 20 nt, Artificial Sequence
  targeting sequence with CTCN PAM
gcuuucaccccuuaccgguu

SEQ ID NO: 9290 - RNA, 20 nt, Artificial Sequence
  targeting sequence with CTCN PAM
ugggaucuugggaagccacu

SEQ ID NO: 9291 - RNA, 20 nt, Artificial Sequence
  targeting sequence with CTCN PAM
uagaagaaaguggcuuccca

SEQ ID NO: 9292 - RNA, 20 nt, Artificial Sequence
  targeting sequence with CTCN PAM
cagguugcugugagacucca

SEQ ID NO: 9293 - RNA, 20 nt, Artificial Sequence
  targeting sequence with CTCN PAM
cagcaaccugugagaaggac

SEQ ID NO: 9294 - RNA, 20 nt, Artificial Sequence
  targeting sequence with CTCN PAM
aaugaguugaaggaugugca

SEQ ID NO: 9295 - RNA, 20 nt, Artificial Sequence
  targeting sequence with CTCN PAM
uuggagucucacagcaaccu

SEQ ID NO: 9296 - RNA, 20 nt, Artificial Sequence
  targeting sequence with CTCN PAM
gacauaugcaaggucacaca

SEQ ID NO: 9297 - RNA, 20 nt, Artificial Sequence
  targeting sequence with CTCN PAM
gaucuguugcaauggcagca

SEQ ID NO: 9298 - RNA, 20 nt, Artificial Sequence
  targeting sequence with CTCN PAM
acacccagcccaccagcucu

SEQ ID NO: 9299 - RNA, 20 nt, Artificial Sequence
  targeting sequence with CTCN PAM
ggcaaggguggcagcagcag

SEQ ID NO: 9300 - RNA, 20 nt, Artificial Sequence
  targeting sequence with CTCN PAM
cuucugcugcugccacccuu

SEQ ID NO: 9301 - RNA, 20 nt, Artificial Sequence
  targeting sequence with CTCN PAM
cuggccacaggcugcccagg

SEQ ID NO: 9302 - RNA, 20 nt, Artificial Sequence
  targeting sequence with CTCN PAM
cccuggccacaggcugccca

SEQ ID NO: 9303 - RNA, 20 nt, Artificial Sequence
  targeting sequence with CTCN PAM
ucuguaggaagagccuguuc

SEQ ID NO: 9304 - RNA, 20 nt, Artificial Sequence
  targeting sequence with CTCN PAM
guaggaagagccuguuccuu

SEQ ID NO: 9305 - RNA, 20 nt, Artificial Sequence
  targeting sequence with CTCN PAM
uccuacagaggagcuguccu

SEQ ID NO: 9306 - RNA, 20 nt, Artificial Sequence
  targeting sequence with CTCN PAM
ccugguuggaaaggaacagg

SEQ ID NO: 9307 - RNA, 20 nt, Artificial Sequence
  targeting sequence with CTCN PAM
ucaguggagcccuggagccc

SEQ ID NO: 9308 - RNA, 20 nt, Artificial Sequence
  targeting sequence with CTCN PAM
acugaagaggucucaccugg

SEQ ID NO: 9309 - RNA, 20 nt, Artificial Sequence
  targeting sequence with CTCN PAM
agggcuccacugaagagguc

SEQ ID NO: 9310 - RNA, 20 nt, Artificial Sequence
  targeting sequence with CTCN PAM
acaucagugccucagggacc

SEQ ID NO: 9311 - RNA, 20 nt, Artificial Sequence
  targeting sequence with CTCN PAM
gggaccucccggagcaggcu

SEQ ID NO: 9312 - RNA, 20 nt, Artificial Sequence
  targeting sequence with CTCN PAM
cggagcaggcuaauaucaga

SEQ ID NO: 9313 - RNA, 20 nt, Artificial Sequence
  targeting sequence with CTCN PAM
gggaggucccugaggcacug

SEQ ID NO: 9314 - RNA, 20 nt, Artificial Sequence
  targeting sequence with CTCN PAM
gauauuagccugcuccggga

SEQ ID NO: 9315 - RNA, 20 nt, Artificial Sequence
  targeting sequence with CTCN PAM
uggucucugauauuagccug

SEQ ID NO: 9316 - RNA, 20 nt, Artificial Sequence
  targeting sequence with CTCN PAM
gccagugucccucuuggucu

SEQ ID NO: 9317 - RNA, 20 nt, Artificial Sequence
  targeting sequence with CTCN PAM
gugauccucugccagugucc

SEQ ID NO: 9318 - RNA, 20 nt, Artificial Sequence
  targeting sequence with CTCN PAM
gucccugccuggacuggggu

SEQ ID NO: 9319 - RNA, 20 nt, Artificial Sequence
  targeting sequence with CTCN PAM
guuggaacaaguugauucuc

SEQ ID NO: 9320 - RNA, 20 nt, Artificial Sequence
  targeting sequence with CTCN PAM
gcaguccuggaggccagaag

SEQ ID NO: 9321 - RNA, 20 nt, Artificial Sequence
  targeting sequence with CTCN PAM
aggacugcagagaaucaacu

SEQ ID NO: 9322 - RNA, 20 nt, Artificial Sequence
  targeting sequence with CTCN PAM
cggggggcuccagggagaag

SEQ ID NO: 9323 - RNA, 20 nt, Artificial Sequence
  targeting sequence with CTCN PAM
agggagaagcuucucuugcc

SEQ ID NO: 9324 - RNA, 20 nt, Artificial Sequence
  targeting sequence with CTCN PAM
cuggagccccccgggagaaa

SEQ ID NO: 9325 - RNA, 20 nt, Artificial Sequence
  targeting sequence with CTCN PAM
ugccucuuccgugucccaac

SEQ ID NO: 9326 - RNA, 20 nt, Artificial Sequence
  targeting sequence with CTCN PAM
uccgugucccaacagcggca

SEQ ID NO: 9327 - RNA, 20 nt, Artificial Sequence
  targeting sequence with CTCN PAM
gucuucacacagccuucucu

SEQ ID NO: 9328 - RNA, 20 nt, Artificial Sequence
  targeting sequence with CTCN PAM
gugucucucuccucuucauu

SEQ ID NO: 9329 - RNA, 20 nt, Artificial Sequence
  targeting sequence with CTCN PAM
cuccucuucauugucucaua

SEQ ID NO: 9330 - RNA, 20 nt, Artificial Sequence
  targeting sequence with CTCN PAM
ccucuucauugucucauaag

SEQ ID NO: 9331 - RNA, 20 nt, Artificial Sequence
  targeting sequence with CTCN PAM
ucuucauugucucauaagga

SEQ ID NO: 9332 - RNA, 20 nt, Artificial Sequence
  targeting sequence with CTCN PAM
ucauugucucauaaggacac

SEQ ID NO: 9333 - RNA, 20 nt, Artificial Sequence
  targeting sequence with CTCN PAM
uaaggacacuugucauugga

SEQ ID NO: 9334 - RNA, 20 nt, Artificial Sequence
  targeting sequence with CTCN PAM
aggaugaucucaugugggga

SEQ ID NO: 9335 - RNA, 20 nt, Artificial Sequence
  targeting sequence with CTCN PAM
uguggggaaccuuaaccaca

SEQ ID NO: 9336 - RNA, 20 nt, Artificial Sequence
  targeting sequence with CTCN PAM
cauccuaacccccacaaccu

SEQ ID NO: 9337 - RNA, 20 nt, Artificial Sequence
  targeting sequence with CTCN PAM
uuggcagccacuguucccuc

SEQ ID NO: 9338 - RNA, 20 nt, Artificial Sequence
  targeting sequence with CTCN PAM
ucucccuugggccagaagca

SEQ ID NO: 9339 - RNA, 20 nt, Artificial Sequence
  targeting sequence with CTCN PAM
cccuugggccagaagcagac

SEQ ID NO: 9340 - RNA, 20 nt, Artificial Sequence
  targeting sequence with CTCN PAM
cuugggccagaagcagacgu

SEQ ID NO: 9341 - RNA, 20 nt, Artificial Sequence
  targeting sequence with CTCN PAM
ggggaagcgggaaggggggc

SEQ ID NO: 9342 - RNA, 20 nt, Artificial Sequence
  targeting sequence with CTCN PAM
cacagacacucgggggaagc

SEQ ID NO: 9343 - RNA, 20 nt, Artificial Sequence
  targeting sequence with CTCN PAM
agaagggguuccacaccccu

SEQ ID NO: 9344 - RNA, 20 nt, Artificial Sequence
  targeting sequence with CTCN PAM
agccaagcccuugauaugac

SEQ ID NO: 9345 - RNA, 20 nt, Artificial Sequence
  targeting sequence with CTCN PAM
uggagcuguugggcuggcau

SEQ ID NO: 9346 - RNA, 20 nt, Artificial Sequence
  targeting sequence with CTCN PAM
aggaggacuuccuccagcca

SEQ ID NO: 9347 - RNA, 20 nt, Artificial Sequence
  targeting sequence with CTCN PAM
ccaugaaugaagaagcugcu

SEQ ID NO: 9348 - RNA, 20 nt, Artificial Sequence
  targeting sequence with CTCN PAM
agggcccaugcuuguggccu

SEQ ID NO: 9349 - RNA, 20 nt, Artificial Sequence
  targeting sequence with CTCN PAM
aacccagacccugcacucuu

SEQ ID NO: 9350 - RNA, 20 nt, Artificial Sequence
  targeting sequence with CTCN PAM
uaacugugugaccuugcaua

SEQ ID NO: 9351 - RNA, 20 nt, Artificial Sequence
  targeting sequence with CTCN PAM
cccucucugaucuucagguu

SEQ ID NO: 9352 - RNA, 20 nt, Artificial Sequence
  targeting sequence with CTCN PAM
cugaucuucagguuccucug

SEQ ID NO: 9353 - RNA, 20 nt, Artificial Sequence
  targeting sequence with CTCN PAM
gaucuucagguuccucugca

SEQ ID NO: 9354 - RNA, 20 nt, Artificial Sequence
  targeting sequence with CTCN PAM
gcaaaagggagguaaugaua

SEQ ID NO: 9355 - RNA, 20 nt, Artificial Sequence
  targeting sequence with CTCN PAM
cuuuugcagaggaaccugaa

SEQ ID NO: 9356 - RNA, 20 nt, Artificial Sequence
  targeting sequence with CTCN PAM
cucuggggggcuguuuggag

SEQ ID NO: 9357 - RNA, 20 nt, Artificial Sequence
  targeting sequence with CTCN PAM
ggggggcuguuuggaggguu

SEQ ID NO: 9358 - RNA, 20 nt, Artificial Sequence
  targeting sequence with CTCN PAM
aaacagccccccagagugag

SEQ ID NO: 9359 - RNA, 20 nt, Artificial Sequence
  targeting sequence with CTCN PAM
gucagguauugagugaggug

SEQ ID NO: 9360 - RNA, 20 nt, Artificial Sequence
  targeting sequence with CTCN PAM
auaccugacagagaaaugca

SEQ ID NO: 9361 - RNA, 20 nt, Artificial Sequence
  targeting sequence with CTCN PAM
cucaauaccugacagagaaa

SEQ ID NO: 9362 - RNA, 20 nt, Artificial Sequence
  targeting sequence with CTCN PAM
aaacguuauuauugaauggu

SEQ ID NO: 9363 - RNA, 20 nt, Artificial Sequence
  targeting sequence with CTCN PAM
ucccccaacaguguauccag

SEQ ID NO: 9364 - RNA, 20 nt, Artificial Sequence
  targeting sequence with CTCN PAM
gccuauccagaacuaaucug

SEQ ID NO: 9365 - RNA, 20 nt, Artificial Sequence
  targeting sequence with CTCN PAM
cagccuauccagaacuaauc

SEQ ID NO: 9366 - RNA, 20 nt, Artificial Sequence
  targeting sequence with CTCN PAM
gaaggagugcaggcagcugc

SEQ ID NO: 9367 - RNA, 20 nt, Artificial Sequence
  targeting sequence with CTCN PAM
uucagagcucucagccuauc

SEQ ID NO: 9368 - RNA, 20 nt, Artificial Sequence
  targeting sequence with CTCN PAM
cagcugccugcacuccuuca

SEQ ID NO: 9369 - RNA, 20 nt, Artificial Sequence
  targeting sequence with CTCN PAM
aggaauccuuuccugauccu

SEQ ID NO: 9370 - RNA, 20 nt, Artificial Sequence
  targeting sequence with CTCN PAM
cagcuucaauccacguucau

SEQ ID NO: 9371 - RNA, 20 nt, Artificial Sequence
  targeting sequence with CTCN PAM
ugccucacagcuucaaucca

SEQ ID NO: 9372 - RNA, 20 nt, Artificial Sequence
  targeting sequence with CTCN PAM
cuccugccucacagcuucaa

SEQ ID NO: 9373 - RNA, 20 nt, Artificial Sequence
  targeting sequence with CTCN PAM
gucccuucugcacaggccac

SEQ ID NO: 9374 - RNA, 20 nt, Artificial Sequence
  targeting sequence with CTCN PAM
ccagccucggucccuucugc

SEQ ID NO: 9375 - RNA, 20 nt, Artificial Sequence
  targeting sequence with CTCN PAM
uggucucaccagccucgguc

SEQ ID NO: 9376 - RNA, 20 nt, Artificial Sequence
  targeting sequence with CTCN PAM
aggucagaugugaaaggaag

SEQ ID NO: 9377 - RNA, 20 nt, Artificial Sequence
  targeting sequence with CTCN PAM
gacuguggccaaguucuucc

SEQ ID NO: 9378 - RNA, 20 nt, Artificial Sequence
  targeting sequence with CTCN PAM
ggcguauggcagggcugccu

SEQ ID NO: 9379 - RNA, 20 nt, Artificial Sequence
  targeting sequence with CTCN PAM
ccaggcagcccugccauacg

SEQ ID NO: 9380 - RNA, 20 nt, Artificial Sequence
  targeting sequence with CTCN PAM
caccaggcagcccugccaua

SEQ ID NO: 9381 - RNA, 20 nt, Artificial Sequence
  targeting sequence with CTCN PAM
uucccucucaccaggcagcc

SEQ ID NO: 9382 - RNA, 20 nt, Artificial Sequence
  targeting sequence with CTCN PAM
cugcucuggagguaugcaag

SEQ ID NO: 9383 - RNA, 20 nt, Artificial Sequence
  targeting sequence with CTCN PAM
ggagguaugcaagcaggacu

SEQ ID NO: 9384 - RNA, 20 nt, Artificial Sequence
  targeting sequence with CTCN PAM
agagcagggagcucauuccc

SEQ ID NO: 9385 - RNA, 20 nt, Artificial Sequence
  targeting sequence with CTCN PAM
caccugccagaggccacaga

SEQ ID NO: 9386 - RNA, 20 nt, Artificial Sequence
  targeting sequence with CTCN PAM
ccugccagaggccacagagc

SEQ ID NO: 9387 - RNA, 20 nt, Artificial Sequence
  targeting sequence with CTCN PAM
ggcaggugagagcccagucc

SEQ ID NO: 9388 - RNA, 20 nt, Artificial Sequence
  targeting sequence with CTCN PAM
guggccucuggcaggugaga

SEQ ID NO: 9389 - RNA, 20 nt, Artificial Sequence
  targeting sequence with CTCN PAM
ggaaagcucuguggccucug

SEQ ID NO: 9390 - RNA, 20 nt, Artificial Sequence
  targeting sequence with CTCN PAM
uccagccucuggaaagcucu

SEQ ID NO: 9391 - RNA, 20 nt, Artificial Sequence
  targeting sequence with CTCN PAM
aaggccucuuugccccugag

SEQ ID NO: 9392 - RNA, 20 nt, Artificial Sequence
  targeting sequence with CTCN PAM
uugccccugagagugguggc

SEQ ID NO: 9393 - RNA, 20 nt, Artificial Sequence
  targeting sequence with CTCN PAM
ggggcaaagaggccuuggag

SEQ ID NO: 9394 - RNA, 20 nt, Artificial Sequence
  targeting sequence with CTCN PAM
caggggcaaagaggccuugg

SEQ ID NO: 9395 - RNA, 20 nt, Artificial Sequence
  targeting sequence with CTCN PAM
ucuugaggccaccuugccac

SEQ ID NO: 9396 - RNA, 20 nt, Artificial Sequence
  targeting sequence with CTCN PAM
agaagagccaccacucucag

SEQ ID NO: 9397 - RNA, 20 nt, Artificial Sequence
  targeting sequence with CTCN PAM
cccggggguuuggaagauag

SEQ ID NO: 9398 - RNA, 20 nt, Artificial Sequence
  targeting sequence with CTCN PAM
aucuuccaaacccccgggug

SEQ ID NO: 9399 - RNA, 20 nt, Artificial Sequence
  targeting sequence with CTCN PAM
cucuaucuuccaaacccccg

SEQ ID NO: 9400 - RNA, 20 nt, Artificial Sequence
  targeting sequence with CTCN PAM
uccgagcugggccccuuucc

SEQ ID NO: 9401 - RNA, 20 nt, Artificial Sequence
  targeting sequence with CTCN PAM
gaugagacacagggcccuuc

SEQ ID NO: 9402 - RNA, 20 nt, Artificial Sequence
  targeting sequence with CTCN PAM
cacuggaaggaagcccaagg

SEQ ID NO: 9403 - RNA, 20 nt, Artificial Sequence
  targeting sequence with CTCN PAM
cuggaaggaagcccaaggau

SEQ ID NO: 9404 - RNA, 20 nt, Artificial Sequence
  targeting sequence with CTCN PAM
gcuggccaugcuugcagccu

SEQ ID NO: 9405 - RNA, 20 nt, Artificial Sequence
  targeting sequence with CTCN PAM
ugacccugucccagcaggac

SEQ ID NO: 9406 - RNA, 20 nt, Artificial Sequence
  targeting sequence with CTCN PAM
caccagcccacuguccugcu

SEQ ID NO: 9407 - RNA, 20 nt, Artificial Sequence
  targeting sequence with CTCN PAM
ccgagcuuccaucugccgcu

SEQ ID NO: 9408 - RNA, 20 nt, Artificial Sequence
  targeting sequence with CTCN PAM
gggaggcagccccacaccuu

SEQ ID NO: 9409 - RNA, 20 nt, Artificial Sequence
  targeting sequence with CTCN PAM
uggagcagauggugguccca

SEQ ID NO: 9410 - RNA, 20 nt, Artificial Sequence
  targeting sequence with CTCN PAM
aggagcuguaccuggguucu

SEQ ID NO: 9411 - RNA, 20 nt, Artificial Sequence
  targeting sequence with CTCN PAM
caccugggcuaacucagcug

SEQ ID NO: 9412 - RNA, 20 nt, Artificial Sequence
  targeting sequence with CTCN PAM
ccugggcuaacucagcugca

SEQ ID NO: 9413 - RNA, 20 nt, Artificial Sequence
  targeting sequence with CTCN PAM
gcugcagccucaguucccuc

SEQ ID NO: 9414 - RNA, 20 nt, Artificial Sequence
  targeting sequence with CTCN PAM
guucccuccucacacacgac

SEQ ID NO: 9415 - RNA, 20 nt, Artificial Sequence
  targeting sequence with CTCN PAM
ucacacacgacgaggaacau

SEQ ID NO: 9416 - RNA, 20 nt, Artificial Sequence
  targeting sequence with CTCN PAM
cacacgacgaggaacaugga

SEQ ID NO: 9417 - RNA, 20 nt, Artificial Sequence
  targeting sequence with CTCN PAM
ucgugugugaggagggaacu

SEQ ID NO: 9418 - RNA, 20 nt, Artificial Sequence
  targeting sequence with CTCN PAM
augugcguuguguggcuuac

SEQ ID NO: 9419 - RNA, 20 nt, Artificial Sequence
  targeting sequence with CTCN PAM
cuggacguaagccacacaac

SEQ ID NO: 9420 - RNA, 20 nt, Artificial Sequence
  targeting sequence with CTCN PAM
gugcugucuucuagauaagc

SEQ ID NO: 9421 - RNA, 20 nt, Artificial Sequence
  targeting sequence with CTCN PAM
gagggaaaaccuugggcugc

SEQ ID NO: 9422 - RNA, 20 nt, Artificial Sequence
  targeting sequence with CTCN PAM
gagcuuccaggcugacggga

SEQ ID NO: 9423 - RNA, 20 nt, Artificial Sequence
  targeting sequence with CTCN PAM
ggaagcagcccaagguuuuc

SEQ ID NO: 9424 - RNA, 20 nt, Artificial Sequence
  targeting sequence with CTCN PAM
gcuaggagcagacugagcau

SEQ ID NO: 9425 - RNA, 20 nt, Artificial Sequence
  targeting sequence with CTCN PAM
uagcagaggccccgggcugg

SEQ ID NO: 9426 - RNA, 20 nt, Artificial Sequence
  targeting sequence with CTCN PAM
gucugcuccuagcagaggcc

SEQ ID NO: 9427 - RNA, 20 nt, Artificial Sequence
  targeting sequence with CTCN PAM
gcccaccuugcuggccuugu

SEQ ID NO: 9428 - RNA, 20 nt, Artificial Sequence
  targeting sequence with CTCN PAM
auaucuagugguuccucuag

SEQ ID NO: 9429 - RNA, 20 nt, Artificial Sequence
  targeting sequence with CTCN PAM
aggguggcgagcacuguuug

SEQ ID NO: 9430 - RNA, 20 nt, Artificial Sequence
  targeting sequence with CTCN PAM
ccacccuagaggaaccacua

SEQ ID NO: 9431 - RNA, 20 nt, Artificial Sequence
  targeting sequence with CTCN PAM
agaugucuucaggucggagc

SEQ ID NO: 9432 - RNA, 20 nt, Artificial Sequence
  targeting sequence with CTCN PAM
gaccugaagacaucuggaga

SEQ ID NO: 9433 - RNA, 20 nt, Artificial Sequence
  targeting sequence with CTCN PAM
cagcgcucucagccaccccu

SEQ ID NO: 9434 - RNA, 20 nt, Artificial Sequence
  targeting sequence with CTCN PAM
cagccaccccuucccagugu

SEQ ID NO: 9435 - RNA, 20 nt, Artificial Sequence
  targeting sequence with CTCN PAM
gccaccccuucccaguguag

SEQ ID NO: 9436 - RNA, 20 nt, Artificial Sequence
  targeting sequence with CTCN PAM
ucaauaggcaucuaccaugu

SEQ ID NO: 9437 - RNA, 20 nt, Artificial Sequence
  targeting sequence with CTCN PAM
uaacacacucagagagcaag

SEQ ID NO: 9438 - RNA, 20 nt, Artificial Sequence
  targeting sequence with CTCN PAM
gagagcaaggacuccgccuc

SEQ ID NO: 9439 - RNA, 20 nt, Artificial Sequence
  targeting sequence with CTCN PAM
gaguguguuaggagcuuuca

SEQ ID NO: 9440 - RNA, 20 nt, Artificial Sequence
  targeting sequence with CTCN PAM
cugaguguguuaggagcuuu

SEQ ID NO: 9441 - RNA, 20 nt, Artificial Sequence
  targeting sequence with CTCN PAM
gccucaucccacagccuggg

SEQ ID NO: 9442 - RNA, 20 nt, Artificial Sequence
  targeting sequence with CTCN PAM
ucccacagccugggaggaga

SEQ ID NO: 9443 - RNA, 20 nt, Artificial Sequence
  targeting sequence with CTCN PAM
caggcugugggaugaggcgg

SEQ ID NO: 9444 - RNA, 20 nt, Artificial Sequence
  targeting sequence with CTCN PAM
ucccaggcugugggaugagg

SEQ ID NO: 9445 - RNA, 20 nt, Artificial Sequence
  targeting sequence with CTCN PAM
ccucccaggcugugggauga

SEQ ID NO: 9446 - RNA, 20 nt, Artificial Sequence
  targeting sequence with CTCN PAM
gcaugcuacagaagaaacca

SEQ ID NO: 9447 - RNA, 20 nt, Artificial Sequence
  targeting sequence with CTCN PAM
acugaucagucccgugggca

SEQ ID NO: 9448 - RNA, 20 nt, Artificial Sequence
  targeting sequence with CTCN PAM
gcaggaagcuccacugauca

SEQ ID NO: 9449 - RNA, 20 nt, Artificial Sequence
  targeting sequence with CTCN PAM
agucucggcaggaagcucca

SEQ ID NO: 9450 - RNA, 20 nt, Artificial Sequence
  targeting sequence with CTCN PAM
caguucggacugugcccaga

SEQ ID NO: 9451 - RNA, 20 nt, Artificial Sequence
  targeting sequence with CTCN PAM
cacccacccacuaugcuagu

SEQ ID NO: 9452 - RNA, 20 nt, Artificial Sequence
  targeting sequence with CTCN PAM
gagcagccacugaauugcuc

SEQ ID NO: 9453 - RNA, 20 nt, Artificial Sequence
  targeting sequence with CTCN PAM
gagaucccacaugaauuuca

SEQ ID NO: 9454 - RNA, 20 nt, Artificial Sequence
  targeting sequence with CTCN PAM
guagggggcuaaauaguggc

SEQ ID NO: 9455 - RNA, 20 nt, Artificial Sequence
  targeting sequence with CTCN PAM
gucuggguguguguaucugu

SEQ ID NO: 9456 - RNA, 20 nt, Artificial Sequence
  targeting sequence with CTCN PAM
caggcucugucugggugugu

SEQ ID NO: 9457 - RNA, 20 nt, Artificial Sequence
  targeting sequence with CTCN PAM
aaauaaggucuggcucacag

SEQ ID NO: 9458 - RNA, 20 nt, Artificial Sequence
  targeting sequence with CTCN PAM
agauggcaucaucuggauua

SEQ ID NO: 9459 - RNA, 20 nt, Artificial Sequence
  targeting sequence with CTCN PAM
uaaagacacaucacaggacu

SEQ ID NO: 9460 - RNA, 20 nt, Artificial Sequence
  targeting sequence with CTCN PAM
cauaaagacacaucacagga

SEQ ID NO: 9461 - RNA, 20 nt, Artificial Sequence
  targeting sequence with CTCN PAM
gccuuucucucauaaagaca

SEQ ID NO: 9462 - RNA, 20 nt, Artificial Sequence
  targeting sequence with CTCN PAM
cucugccuuucucucauaaa

SEQ ID NO: 9463 - RNA, 20 nt, Artificial Sequence
  targeting sequence with CTCN PAM
ugugugugucaaaucucccu

SEQ ID NO: 9464 - RNA, 20 nt, Artificial Sequence
  targeting sequence with CTCN PAM
acguggccccuccugugugu

SEQ ID NO: 9465 - RNA, 20 nt, Artificial Sequence
  targeting sequence with CTCN PAM
gucuccacguggccccuccu

SEQ ID NO: 9466 - RNA, 20 nt, Artificial Sequence
  targeting sequence with CTCN PAM
accucugucuccacguggcc

SEQ ID NO: 9467 - RNA, 20 nt, Artificial Sequence
  targeting sequence with CTCN PAM
aaucuccaccucugucucca

SEQ ID NO: 9468 - RNA, 20 nt, Artificial Sequence
  targeting sequence with CTCN PAM
cgucuuccggcuucuggugg

SEQ ID NO: 9469 - RNA, 20 nt, Artificial Sequence
  targeting sequence with CTCN PAM
gggaagaacccugccucacg

SEQ ID NO: 9470 - RNA, 20 nt, Artificial Sequence
  targeting sequence with CTCN PAM
gcagcgaaggcucugggaag

SEQ ID NO: 9471 - RNA, 20 nt, Artificial Sequence
  targeting sequence with CTCN PAM
gggcguguacccacuucuua

SEQ ID NO: 9472 - RNA, 20 nt, Artificial Sequence
  targeting sequence with CTCN PAM
cacacuugcucaccuguccu

SEQ ID NO: 9473 - RNA, 20 nt, Artificial Sequence
  targeting sequence with CTCN PAM
ccuguccugagaugagaauc

SEQ ID NO: 9474 - RNA, 20 nt, Artificial Sequence
  targeting sequence with CTCN PAM
ggacaggugagcaagugugg

SEQ ID NO: 9475 - RNA, 20 nt, Artificial Sequence
  targeting sequence with CTCN PAM
ucucaggacaggugagcaag

SEQ ID NO: 9476 - RNA, 20 nt, Artificial Sequence
  targeting sequence with CTCN PAM
acucugcagcauauuuggag

SEQ ID NO: 9477 - RNA, 20 nt, Artificial Sequence
  targeting sequence with CTCN PAM
gcagcauauuuggaggauca

SEQ ID NO: 9478 - RNA, 20 nt, Artificial Sequence
  targeting sequence with CTCN PAM
aaauaugcugcagaguagag

SEQ ID NO: 9479 - RNA, 20 nt, Artificial Sequence
  targeting sequence with CTCN PAM
guggcccccgcagugauccu

SEQ ID NO: 9480 - RNA, 20 nt, Artificial Sequence
  targeting sequence with CTCN PAM
ggagacccuggggcaggagc

SEQ ID NO: 9481 - RNA, 20 nt, Artificial Sequence
  targeting sequence with CTCN PAM
ugagucuucugaagugccau

SEQ ID NO: 9482 - RNA, 20 nt, Artificial Sequence
  targeting sequence with CTCN PAM
ugccccagggucuccugagu

SEQ ID NO: 9483 - RNA, 20 nt, Artificial Sequence
  targeting sequence with CTCN PAM
gggcugucagucaaacugcu

SEQ ID NO: 9484 - RNA, 20 nt, Artificial Sequence
  targeting sequence with CTCN PAM
gauuccaccugaggcccugc

SEQ ID NO: 9485 - RNA, 20 nt, Artificial Sequence
  targeting sequence with CTCN PAM
gguggaaucagagggcagcc

SEQ ID NO: 9486 - RNA, 20 nt, Artificial Sequence
  targeting sequence with CTCN PAM
gcuagcagcaaccugccuga

SEQ ID NO: 9487 - RNA, 20 nt, Artificial Sequence
  targeting sequence with CTCN PAM
gccaggccaaaggaagacuu

SEQ ID NO: 9488 - RNA, 20 nt, Artificial Sequence
  targeting sequence with CTCN PAM
cagccaggccaaaggaagac

SEQ ID NO: 9489 - RNA, 20 nt, Artificial Sequence
  targeting sequence with CTCN PAM
gaaacucucagccaggccaa

SEQ ID NO: 9490 - RNA, 20 nt, Artificial Sequence
  targeting sequence with CTCN PAM
agcgcaggucucagaaacuc

SEQ ID NO: 9491 - RNA, 20 nt, Artificial Sequence
  targeting sequence with CTCN PAM
gcuccagcgcaggucucaga

SEQ ID NO: 9492 - RNA, 20 nt, Artificial Sequence
  targeting sequence with CTCN PAM
cucccuucuccauccagcag

SEQ ID NO: 9493 - RNA, 20 nt, Artificial Sequence
  targeting sequence with CTCN PAM
cccuucuccauccagcaggc

SEQ ID NO: 9494 - RNA, 20 nt, Artificial Sequence
  targeting sequence with CTCN PAM
cuucuccauccagcaggcug

SEQ ID NO: 9495 - RNA, 20 nt, Artificial Sequence
  targeting sequence with CTCN PAM
auccagcaggcuggaccugc

SEQ ID NO: 9496 - RNA, 20 nt, Artificial Sequence
  targeting sequence with CTCN PAM
cagaugccaggcagguccag

SEQ ID NO: 9497 - RNA, 20 nt, Artificial Sequence
  targeting sequence with CTCN PAM
cccuacuuucuccuauaccc

SEQ ID NO: 9498 - RNA, 20 nt, Artificial Sequence
  targeting sequence with CTCN PAM
cuacuuucuccuauacccua

SEQ ID NO: 9499 - RNA, 20 nt, Artificial Sequence
  targeting sequence with CTCN PAM
uauacccuaaccuuuguccu

SEQ ID NO: 9500 - RNA, 20 nt, Artificial Sequence
  targeting sequence with CTCN PAM
cccagugagucucuugcagc

SEQ ID NO: 9501 - RNA, 20 nt, Artificial Sequence
  targeting sequence with CTCN PAM
cugggggagucgcccaugca

SEQ ID NO: 9502 - RNA, 20 nt, Artificial Sequence
  targeting sequence with CTCN PAM
ugcagcuuuuaccccagugc

SEQ ID NO: 9503 - RNA, 20 nt, Artificial Sequence
  targeting sequence with CTCN PAM
aagaagcaggcacuggggua

SEQ ID NO: 9504 - RNA, 20 nt, Artificial Sequence
  targeting sequence with CTCN PAM
gugacuguuuucucugaggu

SEQ ID NO: 9505 - RNA, 20 nt, Artificial Sequence
  targeting sequence with CTCN PAM
gagguugugacucgugugag

SEQ ID NO: 9506 - RNA, 20 nt, Artificial Sequence
  targeting sequence with CTCN PAM
gagaaaacagucaccgagcg

SEQ ID NO: 9507 - RNA, 20 nt, Artificial Sequence
  targeting sequence with CTCN PAM
ugugaggcagaagcaguccc

SEQ ID NO: 9508 - RNA, 20 nt, Artificial Sequence
  targeting sequence with CTCN PAM
cacgagucacaaccucagag

SEQ ID NO: 9509 - RNA, 20 nt, Artificial Sequence
  targeting sequence with CTCN PAM
cggggacugcuucugccuca

SEQ ID NO: 9510 - RNA, 20 nt, Artificial Sequence
  targeting sequence with CTCN PAM
ugguaucuuguggaguggag

SEQ ID NO: 9511 - RNA, 20 nt, Artificial Sequence
  targeting sequence with CTCN PAM
acaagauaccaggagggcuc

SEQ ID NO: 9512 - RNA, 20 nt, Artificial Sequence
  targeting sequence with CTCN PAM
acuccacaagauaccaggag

SEQ ID NO: 9513 - RNA, 20 nt, Artificial Sequence
  targeting sequence with CTCN PAM
agguccaagcguucuccacu

SEQ ID NO: 9514 - RNA, 20 nt, Artificial Sequence
  targeting sequence with CTCN PAM
uggcuccagguccaagcguu

SEQ ID NO: 9515 - RNA, 20 nt, Artificial Sequence
  targeting sequence with CTCN PAM
gacaggauguaugucugggc

SEQ ID NO: 9516 - RNA, 20 nt, Artificial Sequence
  targeting sequence with CTCN PAM
aaaaugagccggccagcgca

SEQ ID NO: 9517 - RNA, 20 nt, Artificial Sequence
  targeting sequence with CTCN PAM
uuuuagagacaggaagcugc

SEQ ID NO: 9518 - RNA, 20 nt, Artificial Sequence
  targeting sequence with CTCN PAM
uuugagucuuuaaaucuugu

SEQ ID NO: 9519 - RNA, 20 nt, Artificial Sequence
  targeting sequence with CTCN PAM
aaggagaauaacagugaugu

SEQ ID NO: 9520 - RNA, 20 nt, Artificial Sequence
  targeting sequence with CTCN PAM
gugagcugugaaaggcuaua

SEQ ID NO: 9521 - RNA, 20 nt, Artificial Sequence
  targeting sequence with CTCN PAM
ccgagucugcaagaaagaca

SEQ ID NO: 9522 - RNA, 20 nt, Artificial Sequence
  targeting sequence with CTCN PAM
uucauaugaauaucaauauc

SEQ ID NO: 9523 - RNA, 20 nt, Artificial Sequence
  targeting sequence with CTCN PAM
cuaggccucccuuuccuugu

SEQ ID NO: 9524 - RNA, 20 nt, Artificial Sequence
  targeting sequence with CTCN PAM
aggccucccuuuccuugucu

SEQ ID NO: 9525 - RNA, 20 nt, Artificial Sequence
  targeting sequence with CTCN PAM
cuuuccuugucuaugaaaua

SEQ ID NO: 9526 - RNA, 20 nt, Artificial Sequence
  targeting sequence with CTCN PAM
cacacuacauccuauucuau

SEQ ID NO: 9527 - RNA, 20 nt, Artificial Sequence
  targeting sequence with CTCN PAM
aaaaaauccucacacacuac

SEQ ID NO: 9528 - RNA, 20 nt, Artificial Sequence
  targeting sequence with CTCN PAM
uuuaaccuccaaaaaauccu

SEQ ID NO: 9529 - RNA, 20 nt, Artificial Sequence
  targeting sequence with CTCN PAM
guaguuucuguguguuaacu

SEQ ID NO: 9530 - RNA, 20 nt, Artificial Sequence
  targeting sequence with CTCN PAM
uucccuccucucccacaaau

SEQ ID NO: 9531 - RNA, 20 nt, Artificial Sequence
  targeting sequence with CTCN PAM
ucucccacaaaugucgccuu

SEQ ID NO: 9532 - RNA, 20 nt, Artificial Sequence
  targeting sequence with CTCN PAM
cccacaaaugucgccuugga

SEQ ID NO: 9533 - RNA, 20 nt, Artificial Sequence
  targeting sequence with CTCN PAM
cacaaaugucgccuuggaaa

SEQ ID NO: 9534 - RNA, 20 nt, Artificial Sequence
  targeting sequence with CTCN PAM
gucuuuccaaggcgacauuu

SEQ ID NO: 9535 - RNA, 20 nt, Artificial Sequence
  targeting sequence with CTCN PAM
accaggcugccuccgucuuu

SEQ ID NO: 9536 - RNA, 20 nt, Artificial Sequence
  targeting sequence with CTCN PAM
uagacaccagcauacagagu

SEQ ID NO: 9537 - RNA, 20 nt, Artificial Sequence
  targeting sequence with CTCN PAM
guaugcuggugucuaggaga

SEQ ID NO: 9538 - RNA, 20 nt, Artificial Sequence
  targeting sequence with CTCN PAM
auuucccgguggucacucug

SEQ ID NO: 9539 - RNA, 20 nt, Artificial Sequence
  targeting sequence with CTCN PAM
aagucggugaccaugacccu

SEQ ID NO: 9540 - RNA, 20 nt, Artificial Sequence
  targeting sequence with CTCN PAM
ggcacauucucgaagucggu

SEQ ID NO: 9541 - RNA, 20 nt, Artificial Sequence
  targeting sequence with CTCN PAM
ucgggcacauucucgaaguc

SEQ ID NO: 9542 - RNA, 20 nt, Artificial Sequence
  targeting sequence with CTCN PAM
caucagacggccgugcuuac

SEQ ID NO: 9543 - RNA, 20 nt, Artificial Sequence
  targeting sequence with CTCN PAM
gcccauauccccauccugga

SEQ ID NO: 9544 - RNA, 20 nt, Artificial Sequence
  targeting sequence with CTCN PAM
aggauggggauaugggcaga

SEQ ID NO: 9545 - RNA, 20 nt, Artificial Sequence
  targeting sequence with CTCN PAM
gggguggcaguccccaccca

SEQ ID NO: 9546 - RNA, 20 nt, Artificial Sequence
  targeting sequence with CTCN PAM
uggguugcaccccccccagc

SEQ ID NO: 9547 - RNA, 20 nt, Artificial Sequence
  targeting sequence with CTCN PAM
cugccaucaguugugggaag

SEQ ID NO: 9548 - RNA, 20 nt, Artificial Sequence
  targeting sequence with CTCN PAM
acccuauaacaaaucagcag

SEQ ID NO: 9549 - RNA, 20 nt, Artificial Sequence
  targeting sequence with CTCN PAM
ugugguccuuguguucgucg

SEQ ID NO: 9550 - RNA, 20 nt, Artificial Sequence
  targeting sequence with CTCN PAM
acgaacacaaggaccacaug

SEQ ID NO: 9551 - RNA, 20 nt, Artificial Sequence
  targeting sequence with CTCN PAM
acugccaagggaagggcacg

SEQ ID NO: 9552 - RNA, 20 nt, Artificial Sequence
  targeting sequence with CTCN PAM
uagguaagugauggccccag

SEQ ID NO: 9553 - RNA, 20 nt, Artificial Sequence
  targeting sequence with CTCN PAM
cuccaucuggaccuggccug

SEQ ID NO: 9554 - RNA, 20 nt, Artificial Sequence
  targeting sequence with CTCN PAM
ccaucuggaccuggccuggg

SEQ ID NO: 9555 - RNA, 20 nt, Artificial Sequence
  targeting sequence with CTCN PAM
aucuggaccuggccugggag

SEQ ID NO: 9556 - RNA, 20 nt, Artificial Sequence
  targeting sequence with CTCN PAM
caggccagguccagauggag

SEQ ID NO: 9557 - RNA, 20 nt, Artificial Sequence
  targeting sequence with CTCN PAM
cugggcccagcccaagccac

SEQ ID NO: 9558 - RNA, 20 nt, Artificial Sequence
  targeting sequence with CTCN PAM
cccugggcccagcccaagcc

SEQ ID NO: 9559 - RNA, 20 nt, Artificial Sequence
  targeting sequence with CTCN PAM
uaaccaagaaugcuguggca

SEQ ID NO: 9560 - RNA, 20 nt, Artificial Sequence
  targeting sequence with CTCN PAM
gccgcagagccagagaacca

SEQ ID NO: 9561 - RNA, 20 nt, Artificial Sequence
  targeting sequence with CTCN PAM
gcggcagaggcugccacagc

SEQ ID NO: 9562 - RNA, 20 nt, Artificial Sequence
  targeting sequence with CTCN PAM
ggcucugcggcagaggcugc

SEQ ID NO: 9563 - RNA, 20 nt, Artificial Sequence
  targeting sequence with CTCN PAM
gguucucuggcucugcggca

SEQ ID NO: 9564 - RNA, 20 nt, Artificial Sequence
  targeting sequence with CTCN PAM
uggccacugggaacccugcc

SEQ ID NO: 9565 - RNA, 20 nt, Artificial Sequence
  targeting sequence with CTCN PAM
uggggccuggguuucuucau

SEQ ID NO: 9566 - RNA, 20 nt, Artificial Sequence
  targeting sequence with CTCN PAM
cugggcuaccugcaugaccc

SEQ ID NO: 9567 - RNA, 20 nt, Artificial Sequence
  targeting sequence with CTCN PAM
ccuuuuaaaauccggugaug

SEQ ID NO: 9568 - RNA, 20 nt, Artificial Sequence
  targeting sequence with CTCN PAM
acauugaagauaacauaaca

SEQ ID NO: 9569 - RNA, 20 nt, Artificial Sequence
  targeting sequence with CTCN PAM
aggugaucuaagcaaacuuu

SEQ ID NO: 9570 - RNA, 20 nt, Artificial Sequence
  targeting sequence with CTCN PAM
agucccuccacauugaagau

SEQ ID NO: 9571 - RNA, 20 nt, Artificial Sequence
  targeting sequence with CTCN PAM
gagaccaggggacucacuca

SEQ ID NO: 9572 - RNA, 20 nt, Artificial Sequence
  targeting sequence with CTCN PAM
gagguaugcaagcagaagau

SEQ ID NO: 9573 - RNA, 20 nt, Artificial Sequence
  targeting sequence with CTCN PAM
cucacuugcaugacugggcc

SEQ ID NO: 9574 - RNA, 20 nt, Artificial Sequence
  targeting sequence with CTCN PAM
cuugcaugacugggcccugc

SEQ ID NO: 9575 - RNA, 20 nt, Artificial Sequence
  targeting sequence with CTCN PAM
accacaucugccuggccagu

SEQ ID NO: 9576 - RNA, 20 nt, Artificial Sequence
  targeting sequence with CTCN PAM
gccaguuccuccaccacauc

SEQ ID NO: 9577 - RNA, 20 nt, Artificial Sequence
  targeting sequence with CTCN PAM
acuggacuucauaggggggc

SEQ ID NO: 9578 - RNA, 20 nt, Artificial Sequence
  targeting sequence with CTCN PAM
gggggccgguggacagagaa

SEQ ID NO: 9579 - RNA, 20 nt, Artificial Sequence
  targeting sequence with CTCN PAM
guccaccggcccccagaguc

SEQ ID NO: 9580 - RNA, 20 nt, Artificial Sequence
  targeting sequence with CTCN PAM
ucucuguccaccggccccca

SEQ ID NO: 9581 - RNA, 20 nt, Artificial Sequence
  targeting sequence with CTCN PAM
cucuucucuguccaccggcc

SEQ ID NO: 9582 - RNA, 20 nt, Artificial Sequence
  targeting sequence with CTCN PAM
cccuuacugacuuccuucug

SEQ ID NO: 9583 - RNA, 20 nt, Artificial Sequence
  targeting sequence with CTCN PAM
cuuacugacuuccuucugug

SEQ ID NO: 9584 - RNA, 20 nt, Artificial Sequence
  targeting sequence with CTCN PAM
augucuggccacagaaggaa

SEQ ID NO: 9585 - RNA, 20 nt, Artificial Sequence
  targeting sequence with CTCN PAM
guacagcauguccuggggcu

SEQ ID NO: 9586 - RNA, 20 nt, Artificial Sequence
  targeting sequence with CTCN PAM
ggacugguuucgucaacuau

SEQ ID NO: 9587 - RNA, 20 nt, Artificial Sequence
  targeting sequence with CTCN PAM
cuggacugguuucgucaacu

SEQ ID NO: 9588 - RNA, 20 nt, Artificial Sequence
  targeting sequence with CTCN PAM
ccucucuggacugguuucgu

SEQ ID NO: 9589 - RNA, 20 nt, Artificial Sequence
  targeting sequence with CTCN PAM
agcuggggaacucgcuggga

SEQ ID NO: 9590 - RNA, 20 nt, Artificial Sequence
  targeting sequence with CTCN PAM
cugggaaaacugucagcucu

SEQ ID NO: 9591 - RNA, 20 nt, Artificial Sequence
  targeting sequence with CTCN PAM
gggcagcagcuugacuucca

SEQ ID NO: 9592 - RNA, 20 nt, Artificial Sequence
  targeting sequence with CTCN PAM
ggugcuggcagaggcagccc

SEQ ID NO: 9593 - RNA, 20 nt, Artificial Sequence
  targeting sequence with CTCN PAM
gccagcaccagagccagugu

SEQ ID NO: 9594 - RNA, 20 nt, Artificial Sequence
  targeting sequence with CTCN PAM
gccuuugaaacaggcuagug

SEQ ID NO: 9595 - RNA, 20 nt, Artificial Sequence
  targeting sequence with CTCN PAM
ugggccuucucagccuuuga

SEQ ID NO: 9596 - RNA, 20 nt, Artificial Sequence
  targeting sequence with CTCN PAM
accaguucugcccugagacu

SEQ ID NO: 9597 - RNA, 20 nt, Artificial Sequence
  targeting sequence with CTCN PAM
gggcagaacugguggagcac

SEQ ID NO: 9598 - RNA, 20 nt, Artificial Sequence
  targeting sequence with CTCN PAM
guaggaaagucucagggcag

SEQ ID NO: 9599 - RNA, 20 nt, Artificial Sequence
  targeting sequence with CTCN PAM
gcucagucaggucaguuccu

SEQ ID NO: 9600 - RNA, 20 nt, Artificial Sequence
  targeting sequence with CTCN PAM
gucaggucaguuccugaagg

SEQ ID NO: 9601 - RNA, 20 nt, Artificial Sequence
  targeting sequence with CTCN PAM
acacacugaccuucaggaac

SEQ ID NO: 9602 - RNA, 20 nt, Artificial Sequence
  targeting sequence with CTCN PAM
ccuccacacacugaccuuca

SEQ ID NO: 9603 - RNA, 20 nt, Artificial Sequence
  targeting sequence with CTCN PAM
ggccucuggaggacuuccug

SEQ ID NO: 9604 - RNA, 20 nt, Artificial Sequence
  targeting sequence with CTCN PAM
ggaggacuuccuggagaagu

SEQ ID NO: 9605 - RNA, 20 nt, Artificial Sequence
  targeting sequence with CTCN PAM
agaggccagagcaccaggcc

SEQ ID NO: 9606 - RNA, 20 nt, Artificial Sequence
  targeting sequence with CTCN PAM
aggaaguccuccagaggcca

SEQ ID NO: 9607 - RNA, 20 nt, Artificial Sequence
  targeting sequence with CTCN PAM
acagucacuauugccuuccu

SEQ ID NO: 9608 - RNA, 20 nt, Artificial Sequence
  targeting sequence with CTCN PAM
ucuguaagcaggugauugug

SEQ ID NO: 9609 - RNA, 20 nt, Artificial Sequence
  targeting sequence with CTCN PAM
guaagcaggugauugugugu

SEQ ID NO: 9610 - RNA, 20 nt, Artificial Sequence
  targeting sequence with CTCN PAM
gacuggacacacaaucaccu

SEQ ID NO: 9611 - RNA, 20 nt, Artificial Sequence
  targeting sequence with CTCN PAM
gugcucagacuggacacaca

SEQ ID NO: 9612 - RNA, 20 nt, Artificial Sequence
  targeting sequence with CTCN PAM
ugccuguaaucccagcacuu

SEQ ID NO: 9613 - RNA, 20 nt, Artificial Sequence
  targeting sequence with CTCN PAM
caaagugcugggauuacagg

SEQ ID NO: 9614 - RNA, 20 nt, Artificial Sequence
  targeting sequence with CTCN PAM
gccucccaaagugcugggau

SEQ ID NO: 9615 - RNA, 20 nt, Artificial Sequence
  targeting sequence with CTCN PAM
ggugaucugcccaccucggc

SEQ ID NO: 9616 - RNA, 20 nt, Artificial Sequence
  targeting sequence with CTCN PAM
ugaccucaggugaucugccc

SEQ ID NO: 9617 - RNA, 20 nt, Artificial Sequence
  targeting sequence with CTCN PAM
aacuccugaccucaggugau

SEQ ID NO: 9618 - RNA, 20 nt, Artificial Sequence
  targeting sequence with CTCN PAM
acuaaaaauacaaaaauuag

SEQ ID NO: 9619 - RNA, 20 nt, Artificial Sequence
  targeting sequence with CTCN PAM
caaguagcugggauacagac

SEQ ID NO: 9620 - RNA, 20 nt, Artificial Sequence
  targeting sequence with CTCN PAM
ugccuuagccucccaaguag

SEQ ID NO: 9621 - RNA, 20 nt, Artificial Sequence
  targeting sequence with CTCN PAM
uggguucaagcgauucuccu

SEQ ID NO: 9622 - RNA, 20 nt, Artificial Sequence
  targeting sequence with CTCN PAM
accuccuggguucaagcgau

SEQ ID NO: 9623 - RNA, 20 nt, Artificial Sequence
  targeting sequence with CTCN PAM
cugcaaccuccaccuccugg

SEQ ID NO: 9624 - RNA, 20 nt, Artificial Sequence
  targeting sequence with CTCN PAM
gcucacugcaaccuccaccu

SEQ ID NO: 9625 - RNA, 20 nt, Artificial Sequence
  targeting sequence with CTCN PAM
ggcuggauugcaguggcacg

SEQ ID NO: 9626 - RNA, 20 nt, Artificial Sequence
  targeting sequence with CTCN PAM
aucacucaggcuggauugca

SEQ ID NO: 9627 - RNA, 20 nt, Artificial Sequence
  targeting sequence with CTCN PAM
cucuaucacucaggcuggau

SEQ ID NO: 9628 - RNA, 20 nt, Artificial Sequence
  targeting sequence with CTCN PAM
aaaauaaauaaguaaauaac

SEQ ID NO: 9629 - RNA, 20 nt, Artificial Sequence
  targeting sequence with CTCN PAM
acacucagugccacuccacu

SEQ ID NO: 9630 - RNA, 20 nt, Artificial Sequence
  targeting sequence with CTCN PAM
gugccacuccacucccuccc

SEQ ID NO: 9631 - RNA, 20 nt, Artificial Sequence
  targeting sequence with CTCN PAM
acucccucccuccguggugu

SEQ ID NO: 9632 - RNA, 20 nt, Artificial Sequence
  targeting sequence with CTCN PAM
cucccuccguggugugaggg

SEQ ID NO: 9633 - RNA, 20 nt, Artificial Sequence
  targeting sequence with CTCN PAM
cuccguggugugaggggccu

SEQ ID NO: 9634 - RNA, 20 nt, Artificial Sequence
  targeting sequence with CTCN PAM
guggugugaggggccucacu

SEQ ID NO: 9635 - RNA, 20 nt, Artificial Sequence
  targeting sequence with CTCN PAM
caccacggagggagggagug

SEQ ID NO: 9636 - RNA, 20 nt, Artificial Sequence
  targeting sequence with CTCN PAM
cuagcugucuccuaggagga

SEQ ID NO: 9637 - RNA, 20 nt, Artificial Sequence
  targeting sequence with CTCN PAM
uaggaggagcauggcuguga

SEQ ID NO: 9638 - RNA, 20 nt, Artificial Sequence
  targeting sequence with CTCN PAM
uaggagacagcuagugaggc

SEQ ID NO: 9639 - RNA, 20 nt, Artificial Sequence
  targeting sequence with CTCN PAM
uccuaggagacagcuaguga

SEQ ID NO: 9640 - RNA, 20 nt, Artificial Sequence
  targeting sequence with CTCN PAM
cagccaugcuccuccuagga

SEQ ID NO: 9641 - RNA, 20 nt, Artificial Sequence
  targeting sequence with CTCN PAM
auccuuggccacggcuccug

SEQ ID NO: 9642 - RNA, 20 nt, Artificial Sequence
  targeting sequence with CTCN PAM
uggagacaucuuagaggcca

SEQ ID NO: 9643 - RNA, 20 nt, Artificial Sequence
  targeting sequence with CTCN PAM
aggagccguggccaaggaug

SEQ ID NO: 9644 - RNA, 20 nt, Artificial Sequence
  targeting sequence with CTCN PAM
aagaugucuccaggagccgu

SEQ ID NO: 9645 - RNA, 20 nt, Artificial Sequence
  targeting sequence with CTCN PAM
cacaccucauuugacagggg

SEQ ID NO: 9646 - RNA, 20 nt, Artificial Sequence
  targeting sequence with CTCN PAM
uuugacaggggagaagcugu

SEQ ID NO: 9647 - RNA, 20 nt, Artificial Sequence
  targeting sequence with CTCN PAM
ccugucaaaugagguguggg

SEQ ID NO: 9648 - RNA, 20 nt, Artificial Sequence
  targeting sequence with CTCN PAM
ggcccugaugugcaagggga

SEQ ID NO: 9649 - RNA, 20 nt, Artificial Sequence
  targeting sequence with CTCN PAM
agucuccaggccacugggcc

SEQ ID NO: 9650 - RNA, 20 nt, Artificial Sequence
  targeting sequence with CTCN PAM
aggccacugggccagagcuc

SEQ ID NO: 9651 - RNA, 20 nt, Artificial Sequence
  targeting sequence with CTCN PAM
ggcccaguggccuggagacu

SEQ ID NO: 9652 - RNA, 20 nt, Artificial Sequence
  targeting sequence with CTCN PAM
caggcuggcagaggguuaga

SEQ ID NO: 9653 - RNA, 20 nt, Artificial Sequence
  targeting sequence with CTCN PAM
gccagccugugagcucuggc

SEQ ID NO: 9654 - RNA, 20 nt, Artificial Sequence
  targeting sequence with CTCN PAM
cgccuguaaucuuagcacuu

SEQ ID NO: 9655 - RNA, 20 nt, Artificial Sequence
  targeting sequence with CTCN PAM
caaagugcuaagauuacagg

SEQ ID NO: 9656 - RNA, 20 nt, Artificial Sequence
  targeting sequence with CTCN PAM
cgccuugcccucccaaagug

SEQ ID NO: 9657 - RNA, 20 nt, Artificial Sequence
  targeting sequence with CTCN PAM
ugauccucccgccuugcccu

SEQ ID NO: 9658 - RNA, 20 nt, Artificial Sequence
  targeting sequence with CTCN PAM
auguccugaccucaugaucc

SEQ ID NO: 9659 - RNA, 20 nt, Artificial Sequence
  targeting sequence with CTCN PAM
acuaaaacuacaaaaaauua

SEQ ID NO: 9660 - RNA, 20 nt, Artificial Sequence
  targeting sequence with CTCN PAM
ggaggcugaggcaggagaau

SEQ ID NO: 9661 - RNA, 20 nt, Artificial Sequence
  targeting sequence with CTCN PAM
ugaguagcugggacuacagg

SEQ ID NO: 9662 - RNA, 20 nt, Artificial Sequence
  targeting sequence with CTCN PAM
gccuccugaguagcugggac

SEQ ID NO: 9663 - RNA, 20 nt, Artificial Sequence
  targeting sequence with CTCN PAM
ugccucagccuccugaguag

SEQ ID NO: 9664 - RNA, 20 nt, Artificial Sequence
  targeting sequence with CTCN PAM
cggguucacgccauucuccu

SEQ ID NO: 9665 - RNA, 20 nt, Artificial Sequence
  targeting sequence with CTCN PAM
gccucccggguucacgccau

SEQ ID NO: 9666 - RNA, 20 nt, Artificial Sequence
  targeting sequence with CTCN PAM
cugcaagcuccgccucccgg

SEQ ID NO: 9667 - RNA, 20 nt, Artificial Sequence
  targeting sequence with CTCN PAM
gcucacugcaagcuccgccu

SEQ ID NO: 9668 - RNA, 20 nt, Artificial Sequence
  targeting sequence with CTCN PAM
agccugggcaauagagcgag

SEQ ID NO: 9669 - RNA, 20 nt, Artificial Sequence
  targeting sequence with CTCN PAM
auugcccaggcuggagugca

SEQ ID NO: 9670 - RNA, 20 nt, Artificial Sequence
  targeting sequence with CTCN PAM
cucuauugcccaggcuggag

SEQ ID NO: 9671 - RNA, 20 nt, Artificial Sequence
  targeting sequence with CTCN PAM
gucuggaaagaaaaaaaaaa

SEQ ID NO: 9672 - RNA, 20 nt, Artificial Sequence
  targeting sequence with CTCN PAM
uuuuuuuuuuuuucuuucca

SEQ ID NO: 9673 - RNA, 20 nt, Artificial Sequence
  targeting sequence with CTCN PAM
ugcuacugucaacaguaaca

SEQ ID NO: 9674 - RNA, 20 nt, Artificial Sequence
  targeting sequence with CTCN PAM
cccauuuuggugcaggccau

SEQ ID NO: 9675 - RNA, 20 nt, Artificial Sequence
  targeting sequence with CTCN PAM
acucccccauuuuggugcag

SEQ ID NO: 9676 - RNA, 20 nt, Artificial Sequence
  targeting sequence with CTCN PAM
guggcacuccacucccccau

SEQ ID NO: 9677 - RNA, 20 nt, Artificial Sequence
  targeting sequence with CTCN PAM
aggguggggaguuaugguau

SEQ ID NO: 9678 - RNA, 20 nt, Artificial Sequence
  targeting sequence with CTCN PAM
ccacccuugagggugugguu

SEQ ID NO: 9679 - RNA, 20 nt, Artificial Sequence
  targeting sequence with CTCN PAM
augccuaggaccccccauac

SEQ ID NO: 9680 - RNA, 20 nt, Artificial Sequence
  targeting sequence with CTCN PAM
caggauugucuaaagaauua

SEQ ID NO: 9681 - RNA, 20 nt, Artificial Sequence
  targeting sequence with CTCN PAM
gugaaacagggacaguugcu

SEQ ID NO: 9682 - RNA, 20 nt, Artificial Sequence
  targeting sequence with CTCN PAM
ccagcuguguggccccgccc

SEQ ID NO: 9683 - RNA, 20 nt, Artificial Sequence
  targeting sequence with CTCN PAM
guucaaguuugugugggucc

SEQ ID NO: 9684 - RNA, 20 nt, Artificial Sequence
  targeting sequence with CTCN PAM
accguggccgcaaguguugg

SEQ ID NO: 9685 - RNA, 20 nt, Artificial Sequence
  targeting sequence with CTCN PAM
gaugccccuccaccguggcc

SEQ ID NO: 9686 - RNA, 20 nt, Artificial Sequence
  targeting sequence with CTCN PAM
gagaguggcgggggaaguug

SEQ ID NO: 9687 - RNA, 20 nt, Artificial Sequence
  targeting sequence with CTCN PAM
gaggccuggcucagaugccc

SEQ ID NO: 9688 - RNA, 20 nt, Artificial Sequence
  targeting sequence with CTCN PAM
cugaggccuggcucagaugc

SEQ ID NO: 9689 - RNA, 20 nt, Artificial Sequence
  targeting sequence with CTCN PAM
uuccucugaggcucauccuc

SEQ ID NO: 9690 - RNA, 20 nt, Artificial Sequence
  targeting sequence with CTCN PAM
gaggcucauccucuuggugc

SEQ ID NO: 9691 - RNA, 20 nt, Artificial Sequence
  targeting sequence with CTCN PAM
gaggaaugagaagggcacac

SEQ ID NO: 9692 - RNA, 20 nt, Artificial Sequence
  targeting sequence with CTCN PAM
uccucuuggugccucucuuu

SEQ ID NO: 9693 - RNA, 20 nt, Artificial Sequence
  targeting sequence with CTCN PAM
uggugccucucuuucaugga

SEQ ID NO: 9694 - RNA, 20 nt, Artificial Sequence
  targeting sequence with CTCN PAM
cuuucauggaaagggauaau

SEQ ID NO: 9695 - RNA, 20 nt, Artificial Sequence
  targeting sequence with CTCN PAM
uucauggaaagggauaauaa

SEQ ID NO: 9696 - RNA, 20 nt, Artificial Sequence
  targeting sequence with CTCN PAM
caauaaccuuauuaucccuu

SEQ ID NO: 9697 - RNA, 20 nt, Artificial Sequence
  targeting sequence with CTCN PAM
ggggauccucacaauaaccu

SEQ ID NO: 9698 - RNA, 20 nt, Artificial Sequence
  targeting sequence with CTCN PAM
gucuaagcgucugaauauac

SEQ ID NO: 9699 - RNA, 20 nt, Artificial Sequence
  targeting sequence with CTCN PAM
gugccuggcucugucuaagc

SEQ ID NO: 9700 - RNA, 20 nt, Artificial Sequence
  targeting sequence with CTCN PAM
gcagaaccuugaccaauaca

SEQ ID NO: 9701 - RNA, 20 nt, Artificial Sequence
  targeting sequence with CTCN PAM
uaauauauacauccuacugg

SEQ ID NO: 9702 - RNA, 20 nt, Artificial Sequence
  targeting sequence with CTCN PAM
ugugaccgugcgggcuggca

SEQ ID NO: 9703 - RNA, 20 nt, Artificial Sequence
  targeting sequence with CTCN PAM
guauugcaacaucaaauucu

SEQ ID NO: 9704 - RNA, 20 nt, Artificial Sequence
  targeting sequence with CTCN PAM
cagggaagaaggaauucugc

SEQ ID NO: 9705 - RNA, 20 nt, Artificial Sequence
  targeting sequence with CTCN PAM
gucuguucucuuaaggccuu

SEQ ID NO: 9706 - RNA, 20 nt, Artificial Sequence
  targeting sequence with CTCN PAM
uaaggccuucaacugauuaa

SEQ ID NO: 9707 - RNA, 20 nt, Artificial Sequence
  targeting sequence with CTCN PAM
uuuaaucaguugaaggccuu

SEQ ID NO: 9708 - RNA, 20 nt, Artificial Sequence
  targeting sequence with CTCN PAM
auaacuugggcaggccucau

SEQ ID NO: 9709 - RNA, 20 nt, Artificial Sequence
  targeting sequence with CTCN PAM
cuauaacuugggcaggccuc

SEQ ID NO: 9710 - RNA, 20 nt, Artificial Sequence
  targeting sequence with CTCN PAM
gucuucugauuuaaauguua

SEQ ID NO: 9711 - RNA, 20 nt, Artificial Sequence
  targeting sequence with CTCN PAM
gugccuguaagggaggggcu

SEQ ID NO: 9712 - RNA, 20 nt, Artificial Sequence
  targeting sequence with CTCN PAM
cuuacaggcacagagugaug

SEQ ID NO: 9713 - RNA, 20 nt, Artificial Sequence
  targeting sequence with CTCN PAM
ccuuucccagccccucccuu

SEQ ID NO: 9714 - RNA, 20 nt, Artificial Sequence
  targeting sequence with CTCN PAM
ccaaggggugaccuuggcuu

SEQ ID NO: 9715 - RNA, 20 nt, Artificial Sequence
  targeting sequence with CTCN PAM
caggccuggaguuuauucgg

SEQ ID NO: 9716 - RNA, 20 nt, Artificial Sequence
  targeting sequence with CTCN PAM
aggccugggaggaacaaagc

SEQ ID NO: 9717 - RNA, 20 nt, Artificial Sequence
  targeting sequence with CTCN PAM
acgccgccugccagcgccug

SEQ ID NO: 9718 - RNA, 20 nt, Artificial Sequence
  targeting sequence with CTCN PAM
ccaggcgcuggcaggcggcg

SEQ ID NO: 9719 - RNA, 20 nt, Artificial Sequence
  targeting sequence with CTCN PAM
acuccccagccucagcuccc

SEQ ID NO: 9720 - RNA, 20 nt, Artificial Sequence
  targeting sequence with CTCN PAM
ccagccucagcucccgaggu

SEQ ID NO: 9721 - RNA, 20 nt, Artificial Sequence
  targeting sequence with CTCN PAM
gcucccgagguaggugcugg

SEQ ID NO: 9722 - RNA, 20 nt, Artificial Sequence
  targeting sequence with CTCN PAM
cgagguaggugcuggggcug

SEQ ID NO: 9723 - RNA, 20 nt, Artificial Sequence
  targeting sequence with CTCN PAM
ggagcugaggcuggggagua

SEQ ID NO: 9724 - RNA, 20 nt, Artificial Sequence
  targeting sequence with CTCN PAM
gcccccuacccgcgccuugg

SEQ ID NO: 9725 - RNA, 20 nt, Artificial Sequence
  targeting sequence with CTCN PAM
gcccuccgcccccuacccgc

SEQ ID NO: 9726 - RNA, 20 nt, Artificial Sequence
  targeting sequence with CTCN PAM
gcccuccgcccuccgccccc

SEQ ID NO: 9727 - RNA, 20 nt, Artificial Sequence
  targeting sequence with CTCN PAM
cuccgcccuccgcccuccgc

SEQ ID NO: 9728 - RNA, 20 nt, Artificial Sequence
  targeting sequence with CTCN PAM
aggaacgugccacaagaagc

SEQ ID NO: 9729 - RNA, 20 nt, Artificial Sequence
  targeting sequence with CTCN PAM
uuccaaagccagaaggguuc

SEQ ID NO: 9730 - RNA, 20 nt, Artificial Sequence
  targeting sequence with CTCN PAM
gacgacuccuuccaaagcca

SEQ ID NO: 9731 - RNA, 20 nt, Artificial Sequence
  targeting sequence with CTCN PAM
cgcauggcgggggucucuga

SEQ ID NO: 9732 - RNA, 20 nt, Artificial Sequence
  targeting sequence with CTCN PAM
ccagccucccgcauggcggg

SEQ ID NO: 9733 - RNA, 20 nt, Artificial Sequence
  targeting sequence with CTCN PAM
aaaccuccaucaucgcagag

SEQ ID NO: 9734 - RNA, 20 nt, Artificial Sequence
  targeting sequence with CTCN PAM
aucaucgcagagucugaaua

SEQ ID NO: 9735 - RNA, 20 nt, Artificial Sequence
  targeting sequence with CTCN PAM
gcgaugauggagguuucgag

SEQ ID NO: 9736 - RNA, 20 nt, Artificial Sequence
  targeting sequence with CTCN PAM
cccuccugaaggucuucugg

SEQ ID NO: 9737 - RNA, 20 nt, Artificial Sequence
  targeting sequence with CTCN PAM
cuccugaaggucuucuggua

SEQ ID NO: 9738 - RNA, 20 nt, Artificial Sequence
  targeting sequence with CTCN PAM
ugaaggucuucugguacccg

SEQ ID NO: 9739 - RNA, 20 nt, Artificial Sequence
  targeting sequence with CTCN PAM
ccaucuccauccccaggccc

SEQ ID NO: 9740 - RNA, 20 nt, Artificial Sequence
  targeting sequence with CTCN PAM
auccccaggcccugcguccu

SEQ ID NO: 9741 - RNA, 20 nt, Artificial Sequence
  targeting sequence with CTCN PAM
gcccaauacucuuugggccu

SEQ ID NO: 9742 - RNA, 20 nt, Artificial Sequence
  targeting sequence with CTCN PAM
uugggccucccuguugucca

SEQ ID NO: 9743 - RNA, 20 nt, Artificial Sequence
  targeting sequence with CTCN PAM
cuguuguccagcucucuccg

SEQ ID NO: 9744 - RNA, 20 nt, Artificial Sequence
  targeting sequence with CTCN PAM
cuccgcggcuccaugacuga

SEQ ID NO: 9745 - RNA, 20 nt, Artificial Sequence
  targeting sequence with CTCN PAM
ccgcggcuccaugacugaca

SEQ ID NO: 9746 - RNA, 20 nt, Artificial Sequence
  targeting sequence with CTCN PAM
gcggcuccaugacugacaac

SEQ ID NO: 9747 - RNA, 20 nt, Artificial Sequence
  targeting sequence with CTCN PAM
augacugacaacuugagcaa

SEQ ID NO: 9748 - RNA, 20 nt, Artificial Sequence
  targeting sequence with CTCN PAM
aguugucagucauggagccg

SEQ ID NO: 9749 - RNA, 20 nt, Artificial Sequence
  targeting sequence with CTCN PAM
cauucacauuagccuugcuc

SEQ ID NO: 9750 - RNA, 20 nt, Artificial Sequence
  targeting sequence with CTCN PAM
accgcucccauucacauuag

SEQ ID NO: 9751 - RNA, 20 nt, Artificial Sequence
  targeting sequence with CTCN PAM
gaccucucacccgaggaaca

SEQ ID NO: 9752 - RNA, 20 nt, Artificial Sequence
  targeting sequence with CTCN PAM
cacccgaggaacauccacag

SEQ ID NO: 9753 - RNA, 20 nt, Artificial Sequence
  targeting sequence with CTCN PAM
cccgaggaacauccacagag

SEQ ID NO: 9754 - RNA, 20 nt, Artificial Sequence
  targeting sequence with CTCN PAM
ggugagaggucugagcccuc

SEQ ID NO: 9755 - RNA, 20 nt, Artificial Sequence
  targeting sequence with CTCN PAM
guggauguuccucgggugag

SEQ ID NO: 9756 - RNA, 20 nt, Artificial Sequence
  targeting sequence with CTCN PAM
gugucuguguccccgcagcc

SEQ ID NO: 9757 - RNA, 20 nt, Artificial Sequence
  targeting sequence with CTCN PAM
gcccugaggagcuggggggc

SEQ ID NO: 9758 - RNA, 20 nt, Artificial Sequence
  targeting sequence with CTCN PAM
gggccgaggcuccgugucug

SEQ ID NO: 9759 - RNA, 20 nt, Artificial Sequence
  targeting sequence with CTCN PAM
ucagggccgaggcuccgugu

SEQ ID NO: 9760 - RNA, 20 nt, Artificial Sequence
  targeting sequence with CTCN PAM
ucugacccaccacuccucca

SEQ ID NO: 9761 - RNA, 20 nt, Artificial Sequence
  targeting sequence with CTCN PAM
gacccaccacuccuccagug

SEQ ID NO: 9762 - RNA, 20 nt, Artificial Sequence
  targeting sequence with CTCN PAM
uccagugucaggacacugcg

SEQ ID NO: 9763 - RNA, 20 nt, Artificial Sequence
  targeting sequence with CTCN PAM
agugucaggacacugcgggu

SEQ ID NO: 9764 - RNA, 20 nt, Artificial Sequence
  targeting sequence with CTCN PAM
gcaacccccacccccaacgc

SEQ ID NO: 9765 - RNA, 20 nt, Artificial Sequence
  targeting sequence with CTCN PAM
gccuuguccucucaguuucc

SEQ ID NO: 9766 - RNA, 20 nt, Artificial Sequence
  targeting sequence with CTCN PAM
caguuuccccccguggcacu

SEQ ID NO: 9767 - RNA, 20 nt, Artificial Sequence
  targeting sequence with CTCN PAM
guuuccccccguggcacuua

SEQ ID NO: 9768 - RNA, 20 nt, Artificial Sequence
  targeting sequence with CTCN PAM
cccacuaggauguaaacucc

SEQ ID NO: 9769 - RNA, 20 nt, Artificial Sequence
  targeting sequence with CTCN PAM
acaggggcauugggaaugcu

SEQ ID NO: 9770 - RNA, 20 nt, Artificial Sequence
  targeting sequence with CTCN PAM
gucccuaccauagccaggca

SEQ ID NO: 9771 - RNA, 20 nt, Artificial Sequence
  targeting sequence with CTCN PAM
ccucugucccuaccauagcc

SEQ ID NO: 9772 - RNA, 20 nt, Artificial Sequence
  targeting sequence with CTCN PAM
ggcaccccugccccgcccug

SEQ ID NO: 9773 - RNA, 20 nt, Artificial Sequence
  targeting sequence with CTCN PAM
uaaggaaaaucugacugccc

SEQ ID NO: 9774 - RNA, 20 nt, Artificial Sequence
  targeting sequence with CTCN PAM
aauguccccuccuaaggaaa

SEQ ID NO: 9775 - RNA, 20 nt, Artificial Sequence
  targeting sequence with CTCN PAM
ggccuugccagcugggcugg

SEQ ID NO: 9776 - RNA, 20 nt, Artificial Sequence
  targeting sequence with CTCN PAM
gcaaccccucucuugggcuc

SEQ ID NO: 9777 - RNA, 20 nt, Artificial Sequence
  targeting sequence with CTCN PAM
cuugggcuccuuucucugcc

SEQ ID NO: 9778 - RNA, 20 nt, Artificial Sequence
  targeting sequence with CTCN PAM
ugggcuccuuucucugccac

SEQ ID NO: 9779 - RNA, 20 nt, Artificial Sequence
  targeting sequence with CTCN PAM
uuucucugccacccaccucc

SEQ ID NO: 9780 - RNA, 20 nt, Artificial Sequence
  targeting sequence with CTCN PAM
gccacccaccuccucaccuu

SEQ ID NO: 9781 - RNA, 20 nt, Artificial Sequence
  targeting sequence with CTCN PAM
ucaccuuuccaggucaucac

SEQ ID NO: 9782 - RNA, 20 nt, Artificial Sequence
  targeting sequence with CTCN PAM
ccuuuccaggucaucacagu

SEQ ID NO: 9783 - RNA, 20 nt, Artificial Sequence
  targeting sequence with CTCN PAM
uugccccaggggaggacauc

SEQ ID NO: 9784 - RNA, 20 nt, Artificial Sequence
  targeting sequence with CTCN PAM
ccuggggcaaagagguccac

SEQ ID NO: 9785 - RNA, 20 nt, Artificial Sequence
  targeting sequence with CTCN PAM
agcgacugcagcaccugcuu

SEQ ID NO: 9786 - RNA, 20 nt, Artificial Sequence
  targeting sequence with CTCN PAM
gugacacaaagcaggugcug

SEQ ID NO: 9787 - RNA, 20 nt, Artificial Sequence
  targeting sequence with CTCN PAM
gccaccgugaugcuaacagc

SEQ ID NO: 9788 - RNA, 20 nt, Artificial Sequence
  targeting sequence with CTCN PAM
agugccaggcucugugcagg

SEQ ID NO: 9789 - RNA, 20 nt, Artificial Sequence
  targeting sequence with CTCN PAM
gugcagggggaccagagaug

SEQ ID NO: 9790 - RNA, 20 nt, Artificial Sequence
  targeting sequence with CTCN PAM
ggucccccugcacagagccu

SEQ ID NO: 9791 - RNA, 20 nt, Artificial Sequence
  targeting sequence with CTCN PAM
gucugaugagggaggcgagu

SEQ ID NO: 9792 - RNA, 20 nt, Artificial Sequence
  targeting sequence with CTCN PAM
ucagacugaguguccuugaa

SEQ ID NO: 9793 - RNA, 20 nt, Artificial Sequence
  targeting sequence with CTCN PAM
cucaucagacugaguguccu

SEQ ID NO: 9794 - RNA, 20 nt, Artificial Sequence
  targeting sequence with CTCN PAM
ccucccucaucagacugagu

SEQ ID NO: 9795 - RNA, 20 nt, Artificial Sequence
  targeting sequence with CTCN PAM
gugcacucgccucccucauc

SEQ ID NO: 9796 - RNA, 20 nt, Artificial Sequence
  targeting sequence with CTCN PAM
uguuuccucugugcacucgc

SEQ ID NO: 9797 - RNA, 20 nt, Artificial Sequence
  targeting sequence with CTCN PAM
aauacagcccugaccucgug

SEQ ID NO: 9798 - RNA, 20 nt, Artificial Sequence
  targeting sequence with CTCN PAM
cucuaauacagcccugaccu

SEQ ID NO: 9799 - RNA, 20 nt, Artificial Sequence
  targeting sequence with CTCN PAM
gggcucccucuaauacagcc

SEQ ID NO: 9800 - RNA, 20 nt, Artificial Sequence
  targeting sequence with CTCN PAM
ucugggcucccucuaauaca

SEQ ID NO: 9801 - RNA, 20 nt, Artificial Sequence
  targeting sequence with CTCN PAM
ggcugggcaggugccuccuc

SEQ ID NO: 9802 - RNA, 20 nt, Artificial Sequence
  targeting sequence with CTCN PAM
gacccucgggcugggcaggu

SEQ ID NO: 9803 - RNA, 20 nt, Artificial Sequence
  targeting sequence with CTCN PAM
aagaugccuucucugacccu

SEQ ID NO: 9804 - RNA, 20 nt, Artificial Sequence
  targeting sequence with CTCN PAM
uccaagaugccuucucugac

SEQ ID NO: 9805 - RNA, 20 nt, Artificial Sequence
  targeting sequence with CTCN PAM
cgaucaaaugucccuccucc

SEQ ID NO: 9806 - RNA, 20 nt, Artificial Sequence
  targeting sequence with CTCN PAM
uauucauccaucaagcuccc

SEQ ID NO: 9807 - RNA, 20 nt, Artificial Sequence
  targeting sequence with CTCN PAM
aagccuugguaguugcuguc

SEQ ID NO: 9808 - RNA, 20 nt, Artificial Sequence
  targeting sequence with CTCN PAM
caccucuaagccuugguagu

SEQ ID NO: 9809 - RNA, 20 nt, Artificial Sequence
  targeting sequence with CTCN PAM
cacaccucuaagccuuggua

SEQ ID NO: 9810 - RNA, 20 nt, Artificial Sequence
  targeting sequence with CTCN PAM
ucucacaccucuaagccuug

SEQ ID NO: 9811 - RNA, 20 nt, Artificial Sequence
  targeting sequence with CTCN PAM
cugaguaaggacugcaggcg

SEQ ID NO: 9812 - RNA, 20 nt, Artificial Sequence
  targeting sequence with CTCN PAM
gugagguaagacagccuccu

SEQ ID NO: 9813 - RNA, 20 nt, Artificial Sequence
  targeting sequence with CTCN PAM
aagguaagccgccugcaguc

SEQ ID NO: 9814 - RNA, 20 nt, Artificial Sequence
  targeting sequence with CTCN PAM
ucucgaagguaagccgccug

SEQ ID NO: 9815 - RNA, 20 nt, Artificial Sequence
  targeting sequence with CTCN PAM
cuucucgaagguaagccgcc

SEQ ID NO: 9816 - RNA, 20 nt, Artificial Sequence
  targeting sequence with CTCN PAM
ugccagugcacacacgcaca

SEQ ID NO: 9817 - RNA, 20 nt, Artificial Sequence
  targeting sequence with CTCN PAM
ugccccagcaggggacuccu

SEQ ID NO: 9818 - RNA, 20 nt, Artificial Sequence
  targeting sequence with CTCN PAM
gcagacagcaucauggcugc

SEQ ID NO: 9819 - RNA, 20 nt, Artificial Sequence
  targeting sequence with CTCN PAM
ggcucggcagacagcaucau

SEQ ID NO: 9820 - RNA, 20 nt, Artificial Sequence
  targeting sequence with CTCN PAM
cccuggccgaguugaggcag

SEQ ID NO: 9821 - RNA, 20 nt, Artificial Sequence
  targeting sequence with CTCN PAM
gccagggugagcuccggcuc

SEQ ID NO: 9822 - RNA, 20 nt, Artificial Sequence
  targeting sequence with CTCN PAM
acucggccagggugagcucc

SEQ ID NO: 9823 - RNA, 20 nt, Artificial Sequence
  targeting sequence with CTCN PAM
gccucaacucggccagggug

SEQ ID NO: 9824 - RNA, 20 nt, Artificial Sequence
  targeting sequence with CTCN PAM
gccaaagaugucaucaauga

SEQ ID NO: 9825 - RNA, 20 nt, Artificial Sequence
  targeting sequence with CTCN PAM
uugaugacaucuuuggcaga

SEQ ID NO: 9826 - RNA, 20 nt, Artificial Sequence
  targeting sequence with CTCN PAM
gggaaccaggccucauugau

SEQ ID NO: 9827 - RNA, 20 nt, Artificial Sequence
  targeting sequence with CTCN PAM
caagccccagccuggacuug

SEQ ID NO: 9828 - RNA, 20 nt, Artificial Sequence
  targeting sequence with CTCN PAM
cccuucucccuugucugugu

SEQ ID NO: 9829 - RNA, 20 nt, Artificial Sequence
  targeting sequence with CTCN PAM
cuucucccuugucuguguaa

SEQ ID NO: 9830 - RNA, 20 nt, Artificial Sequence
  targeting sequence with CTCN PAM
cuugucuguguaaggaggau

SEQ ID NO: 9831 - RNA, 20 nt, Artificial Sequence
  targeting sequence with CTCN PAM
uuacacagacaagggagaag

SEQ ID NO: 9832 - RNA, 20 nt, Artificial Sequence
  targeting sequence with CTCN PAM
uuuaauccuauuuaaggugg

SEQ ID NO: 9833 - RNA, 20 nt, Artificial Sequence
  targeting sequence with CTCN PAM
gaaagggcugugcaauauuu

SEQ ID NO: 9834 - RNA, 20 nt, Artificial Sequence
  targeting sequence with CTCN PAM
auaaaaacacguuaugaaaa

SEQ ID NO: 9835 - RNA, 20 nt, Artificial Sequence
  targeting sequence with CTCN PAM
acugucucuauaaaaacacg

SEQ ID NO: 9836 - RNA, 20 nt, Artificial Sequence
  targeting sequence with CTCN PAM
ucucuccuaccaugaacuaa

SEQ ID NO: 9837 - RNA, 20 nt, Artificial Sequence
  targeting sequence with CTCN PAM
cuccuaccaugaacuaaaga

SEQ ID NO: 9838 - RNA, 20 nt, Artificial Sequence
  targeting sequence with CTCN PAM
ccuaccaugaacuaaagauu

SEQ ID NO: 9839 - RNA, 20 nt, Artificial Sequence
  targeting sequence with CTCN PAM
uaccaugaacuaaagauuuc

SEQ ID NO: 9840 - RNA, 20 nt, Artificial Sequence
  targeting sequence with CTCN PAM
acagaaaucuuuaguucaug

SEQ ID NO: 9841 - RNA, 20 nt, Artificial Sequence
  targeting sequence with CTCN PAM
cucccagcacccccuccuca

SEQ ID NO: 9842 - RNA, 20 nt, Artificial Sequence
  targeting sequence with CTCN PAM
cagcacccccuccucauccc

SEQ ID NO: 9843 - RNA, 20 nt, Artificial Sequence
  targeting sequence with CTCN PAM
ucaucccaggcccuuuuugc

SEQ ID NO: 9844 - RNA, 20 nt, Artificial Sequence
  targeting sequence with CTCN PAM
ucccaggcccuuuuugcagg

SEQ ID NO: 9845 - RNA, 20 nt, Artificial Sequence
  targeting sequence with CTCN PAM
gggccuacacggauggccac

SEQ ID NO: 9846 - RNA, 20 nt, Artificial Sequence
  targeting sequence with CTCN PAM
ucuggggcgcagcgggcgac

SEQ ID NO: 9847 - RNA, 20 nt, Artificial Sequence
  targeting sequence with CTCN PAM
ucaucuggggcgcagcgggc

SEQ ID NO: 9848 - RNA, 20 nt, Artificial Sequence
  targeting sequence with CTCN PAM
gcagcuccucaucuggggcg

SEQ ID NO: 9849 - RNA, 20 nt, Artificial Sequence
  targeting sequence with CTCN PAM
aguuucuccaggagugggaa

SEQ ID NO: 9850 - RNA, 20 nt, Artificial Sequence
  targeting sequence with CTCN PAM
aggagugggaagcggcgggg

SEQ ID NO: 9851 - RNA, 20 nt, Artificial Sequence
  targeting sequence with CTCN PAM
uggagaaacuggagcagcuc

SEQ ID NO: 9852 - RNA, 20 nt, Artificial Sequence
  targeting sequence with CTCN PAM
ccccgccgcuucccacuccu

SEQ ID NO: 9853 - RNA, 20 nt, Artificial Sequence
  targeting sequence with CTCN PAM
augcgcucgccccgccgcuu

SEQ ID NO: 9854 - RNA, 20 nt, Artificial Sequence
  targeting sequence with CTCN PAM
uucgugugugugugugugug

SEQ ID NO: 9855 - RNA, 20 nt, Artificial Sequence
  targeting sequence with CTCN PAM
gggacccccagcaagccccu

SEQ ID NO: 9856 - RNA, 20 nt, Artificial Sequence
  targeting sequence with CTCN PAM
auccuccagacuccagcucu

SEQ ID NO: 9857 - RNA, 20 nt, Artificial Sequence
  targeting sequence with CTCN PAM
agacuccagcucuucuguaa

SEQ ID NO: 9858 - RNA, 20 nt, Artificial Sequence
  targeting sequence with CTCN PAM
agcucuucuguaagcuuaca

SEQ ID NO: 9859 - RNA, 20 nt, Artificial Sequence
  targeting sequence with CTCN PAM
ucuguaagcuuacagggcug

SEQ ID NO: 9860 - RNA, 20 nt, Artificial Sequence
  targeting sequence with CTCN PAM
uggucuggccagcccuguaa

SEQ ID NO: 9861 - RNA, 20 nt, Artificial Sequence
  targeting sequence with CTCN PAM
ucacuucacgcggcuggggg

SEQ ID NO: 9862 - RNA, 20 nt, Artificial Sequence
  targeting sequence with CTCN PAM
cuucacgcggcugggggcug

SEQ ID NO: 9863 - RNA, 20 nt, Artificial Sequence
  targeting sequence with CTCN PAM
agcagcccccagccgcguga

SEQ ID NO: 9864 - RNA, 20 nt, Artificial Sequence
  targeting sequence with CTCN PAM
ccagcagcccccagccgcgu

SEQ ID NO: 9865 - RNA, 20 nt, Artificial Sequence
  targeting sequence with CTCN PAM
cuccagcagcccccagccgc

SEQ ID NO: 9866 - RNA, 20 nt, Artificial Sequence
  targeting sequence with CTCN PAM
aggaaacccuucccgcugug

SEQ ID NO: 9867 - RNA, 20 nt, Artificial Sequence
  targeting sequence with CTCN PAM
ccugggugugagcgugcggc

SEQ ID NO: 9868 - RNA, 20 nt, Artificial Sequence
  targeting sequence with CTCN PAM
cacccaggugagcauugaaa

SEQ ID NO: 9869 - RNA, 20 nt, Artificial Sequence
  targeting sequence with CTCN PAM
cgcggcccugccgcacgcuc

SEQ ID NO: 9870 - RNA, 20 nt, Artificial Sequence
  targeting sequence with CTCN PAM
ggacucagccaucucuaggc

SEQ ID NO: 9871 - RNA, 20 nt, Artificial Sequence
  targeting sequence with CTCN PAM
gccaucucuaggccccucuc

SEQ ID NO: 9872 - RNA, 20 nt, Artificial Sequence
  targeting sequence with CTCN PAM
aggccccucucacucaggug

SEQ ID NO: 9873 - RNA, 20 nt, Artificial Sequence
  targeting sequence with CTCN PAM
cacucaggugcuccaugguu

SEQ ID NO: 9874 - RNA, 20 nt, Artificial Sequence
  targeting sequence with CTCN PAM
cucaggugcuccaugguucu

SEQ ID NO: 9875 - RNA, 20 nt, Artificial Sequence
  targeting sequence with CTCN PAM
ggugcuccaugguucuggga

SEQ ID NO: 9876 - RNA, 20 nt, Artificial Sequence
  targeting sequence with CTCN PAM
augguucugggagcugagaa

SEQ ID NO: 9877 - RNA, 20 nt, Artificial Sequence
  targeting sequence with CTCN PAM
cagaaccauggagcaccuga

SEQ ID NO: 9878 - RNA, 20 nt, Artificial Sequence
  targeting sequence with CTCN PAM
gcucccagaaccauggagca

SEQ ID NO: 9879 - RNA, 20 nt, Artificial Sequence
  targeting sequence with CTCN PAM
aaccagcaaaaaaguggaau

SEQ ID NO: 9880 - RNA, 20 nt, Artificial Sequence
  targeting sequence with CTCN PAM
uagcugggcacugcccuucc

SEQ ID NO: 9881 - RNA, 20 nt, Artificial Sequence
  targeting sequence with CTCN PAM
ccuagcugggcacugcccuu

SEQ ID NO: 9882 - RNA, 20 nt, Artificial Sequence
  targeting sequence with CTCN PAM
cucuccuagcugggcacugc

SEQ ID NO: 9883 - RNA, 20 nt, Artificial Sequence
  targeting sequence with CTCN PAM
ucacucuccuagcugggcac

SEQ ID NO: 9884 - RNA, 20 nt, Artificial Sequence
  targeting sequence with CTCN PAM
agccagaaaugccugccccu

SEQ ID NO: 9885 - RNA, 20 nt, Artificial Sequence
  targeting sequence with CTCN PAM
ucaagccagaaaugccugcc

SEQ ID NO: 9886 - RNA, 20 nt, Artificial Sequence
  targeting sequence with CTCN PAM
ugugagaggcagagugggug

SEQ ID NO: 9887 - RNA, 20 nt, Artificial Sequence
  targeting sequence with CTCN PAM
cacgagcauuaagaccccau

SEQ ID NO: 9888 - RNA, 20 nt, Artificial Sequence
  targeting sequence with CTCN PAM
cacacgagcauuaagacccc

SEQ ID NO: 9889 - RNA, 20 nt, Artificial Sequence
  targeting sequence with CTCN PAM
gccucucacacgagcauuaa

SEQ ID NO: 9890 - RNA, 20 nt, Artificial Sequence
  targeting sequence with CTCN PAM
acccacucugccucucacac

SEQ ID NO: 9891 - RNA, 20 nt, Artificial Sequence
  targeting sequence with CTCN PAM
acuccacccacucugccucu

SEQ ID NO: 9892 - RNA, 20 nt, Artificial Sequence
  targeting sequence with CTCN PAM
uggauuucucucuaucucca

SEQ ID NO: 9893 - RNA, 20 nt, Artificial Sequence
  targeting sequence with CTCN PAM
cuaucuccauuuugaaacca

SEQ ID NO: 9894 - RNA, 20 nt, Artificial Sequence
  targeting sequence with CTCN PAM
aucuccauuuugaaaccacu

SEQ ID NO: 9895 - RNA, 20 nt, Artificial Sequence
  targeting sequence with CTCN PAM
auuuugaaaccacucugugu

SEQ ID NO: 9896 - RNA, 20 nt, Artificial Sequence
  targeting sequence with CTCN PAM
guguuuggaagaacuuuuga

SEQ ID NO: 9897 - RNA, 20 nt, Artificial Sequence
  targeting sequence with CTCN PAM
aaaguucuuccaaacacaga

SEQ ID NO: 9898 - RNA, 20 nt, Artificial Sequence
  targeting sequence with CTCN PAM
gaauacucaaaaguucuucc

SEQ ID NO: 9899 - RNA, 20 nt, Artificial Sequence
  targeting sequence with CTCN PAM
ugcccaaggaagacuguucu

SEQ ID NO: 9900 - RNA, 20 nt, Artificial Sequence
  targeting sequence with CTCN PAM
cuccugcccaaggaagacug

SEQ ID NO: 9901 - RNA, 20 nt, Artificial Sequence
  targeting sequence with CTCN PAM
uuguccccagaaggcugggu

SEQ ID NO: 9902 - RNA, 20 nt, Artificial Sequence
  targeting sequence with CTCN PAM
ucagugucccugccaggggc

SEQ ID NO: 9903 - RNA, 20 nt, Artificial Sequence
  targeting sequence with CTCN PAM
agcacccucaucaguguccc

SEQ ID NO: 9904 - RNA, 20 nt, Artificial Sequence
  targeting sequence with CTCN PAM
aaggcccaagggggcaagcu

SEQ ID NO: 9905 - RNA, 20 nt, Artificial Sequence
  targeting sequence with CTCN PAM
cccccaaaagcguugugggc

SEQ ID NO: 9906 - RNA, 20 nt, Artificial Sequence
  targeting sequence with CTCN PAM
accagcugaggccagcaugg

SEQ ID NO: 9907 - RNA, 20 nt, Artificial Sequence
  targeting sequence with CTCN PAM
gcugguggagcuguguggac

SEQ ID NO: 9908 - RNA, 20 nt, Artificial Sequence
  targeting sequence with CTCN PAM
cagguaggaggcugggcuug

SEQ ID NO: 9909 - RNA, 20 nt, Artificial Sequence
  targeting sequence with CTCN PAM
uaccugugaggacguggccc

SEQ ID NO: 9910 - RNA, 20 nt, Artificial Sequence
  targeting sequence with CTCN PAM
ccccagggcaagcccagccu

SEQ ID NO: 9911 - RNA, 20 nt, Artificial Sequence
  targeting sequence with CTCN PAM
ucaccccagggcaagcccag

SEQ ID NO: 9912 - RNA, 20 nt, Artificial Sequence
  targeting sequence with CTCN PAM
uucuccuuaugcacccacug

SEQ ID NO: 9913 - RNA, 20 nt, Artificial Sequence
  targeting sequence with CTCN PAM
uuaugcacccacugcccgcg

SEQ ID NO: 9914 - RNA, 20 nt, Artificial Sequence
  targeting sequence with CTCN PAM
cgggcagugggugcauaagg

SEQ ID NO: 9915 - RNA, 20 nt, Artificial Sequence
  targeting sequence with CTCN PAM
caagugugauccaugagacu

SEQ ID NO: 9916 - RNA, 20 nt, Artificial Sequence
  targeting sequence with CTCN PAM
uggaucacacuugugaggac

SEQ ID NO: 9917 - RNA, 20 nt, Artificial Sequence
  targeting sequence with CTCN PAM
agccugacuugcaguuccau

SEQ ID NO: 9918 - RNA, 20 nt, Artificial Sequence
  targeting sequence with CTCN PAM
gguucugccacuuccaugcc

SEQ ID NO: 9919 - RNA, 20 nt, Artificial Sequence
  targeting sequence with CTCN PAM
aagggcauggaaguggcaga

SEQ ID NO: 9920 - RNA, 20 nt, Artificial Sequence
  targeting sequence with CTCN PAM
ucaucucagcuuccuccucc

SEQ ID NO: 9921 - RNA, 20 nt, Artificial Sequence
  targeting sequence with CTCN PAM
ucucagcuuccuccuccaua

SEQ ID NO: 9922 - RNA, 20 nt, Artificial Sequence
  targeting sequence with CTCN PAM
gcuuccuccuccauaagagg

SEQ ID NO: 9923 - RNA, 20 nt, Artificial Sequence
  targeting sequence with CTCN PAM
uccauaagagggaaaaaggu

SEQ ID NO: 9924 - RNA, 20 nt, Artificial Sequence
  targeting sequence with CTCN PAM
auaagagggaaaaagguauu

SEQ ID NO: 9925 - RNA, 20 nt, Artificial Sequence
  targeting sequence with CTCN PAM
uauggaggaggaagcugaga

SEQ ID NO: 9926 - RNA, 20 nt, Artificial Sequence
  targeting sequence with CTCN PAM
uuguguugcaaggagauggg

SEQ ID NO: 9927 - RNA, 20 nt, Artificial Sequence
  targeting sequence with CTCN PAM
uugcaacacaaugaggcagg

SEQ ID NO: 9928 - RNA, 20 nt, Artificial Sequence
  targeting sequence with CTCN PAM
aggccagugcccuagaugcu

SEQ ID NO: 9929 - RNA, 20 nt, Artificial Sequence
  targeting sequence with CTCN PAM
uggacugcaccaccuuaggc

SEQ ID NO: 9930 - RNA, 20 nt, Artificial Sequence
  targeting sequence with CTCN PAM
ccuggacugcaccaccuuag

SEQ ID NO: 9931 - RNA, 20 nt, Artificial Sequence
  targeting sequence with CTCN PAM
agagagaggcccccggcugg

SEQ ID NO: 9932 - RNA, 20 nt, Artificial Sequence
  targeting sequence with CTCN PAM
ggagcugccucuccuggacu

SEQ ID NO: 9933 - RNA, 20 nt, Artificial Sequence
  targeting sequence with CTCN PAM
cuggagcugccucuccugga

SEQ ID NO: 9934 - RNA, 20 nt, Artificial Sequence
  targeting sequence with CTCN PAM
cucuggagcugccucuccug

SEQ ID NO: 9935 - RNA, 20 nt, Artificial Sequence
  targeting sequence with CTCN PAM
uuucagccccagccgggggc

SEQ ID NO: 9936 - RNA, 20 nt, Artificial Sequence
  targeting sequence with CTCN PAM
guuugaauuucacccugccg

SEQ ID NO: 9937 - RNA, 20 nt, Artificial Sequence
  targeting sequence with CTCN PAM
auagcugugugacuugggca

SEQ ID NO: 9938 - RNA, 20 nt, Artificial Sequence
  targeting sequence with CTCN PAM
guaugaggaaaugaugagug

SEQ ID NO: 9939 - RNA, 20 nt, Artificial Sequence
  targeting sequence with CTCN PAM
uacagagauguuaaguaauu

SEQ ID NO: 9940 - RNA, 20 nt, Artificial Sequence
  targeting sequence with CTCN PAM
ucauuuccucauacagagau

SEQ ID NO: 9941 - RNA, 20 nt, Artificial Sequence
  targeting sequence with CTCN PAM
gguauaggcaacuauugacg

SEQ ID NO: 9942 - RNA, 20 nt, Artificial Sequence
  targeting sequence with CTCN PAM
uggggcaucaagggauggug

SEQ ID NO: 9943 - RNA, 20 nt, Artificial Sequence
  targeting sequence with CTCN PAM
gggcaccaucccuugaugcc

SEQ ID NO: 9944 - RNA, 20 nt, Artificial Sequence
  targeting sequence with CTCN PAM
gccucagggcaccaucccuu

SEQ ID NO: 9945 - RNA, 20 nt, Artificial Sequence
  targeting sequence with CTCN PAM
acccaaccagaacagcucag

SEQ ID NO: 9946 - RNA, 20 nt, Artificial Sequence
  targeting sequence with CTCN PAM
ugcuccacccaaccagaaca

SEQ ID NO: 9947 - RNA, 20 nt, Artificial Sequence
  targeting sequence with CTCN PAM
caugcuccacccaaccagaa

SEQ ID NO: 9948 - RNA, 20 nt, Artificial Sequence
  targeting sequence with CTCN PAM
agccuggaauaagaggcuca

SEQ ID NO: 9949 - RNA, 20 nt, Artificial Sequence
  targeting sequence with CTCN PAM
uauuccaggcuggaguccca

SEQ ID NO: 9950 - RNA, 20 nt, Artificial Sequence
  targeting sequence with CTCN PAM
gaguugauucucgucugagc

SEQ ID NO: 9951 - RNA, 20 nt, Artificial Sequence
  targeting sequence with CTCN PAM
gagccucuuauuccaggcug

SEQ ID NO: 9952 - RNA, 20 nt, Artificial Sequence
  targeting sequence with CTCN PAM
ucugagcacguccaggggaa

SEQ ID NO: 9953 - RNA, 20 nt, Artificial Sequence
  targeting sequence with CTCN PAM
gacgagaaucaacucugagc

SEQ ID NO: 9954 - RNA, 20 nt, Artificial Sequence
  targeting sequence with CTCN PAM
gugguuccccuggacgugcu

SEQ ID NO: 9955 - RNA, 20 nt, Artificial Sequence
  targeting sequence with CTCN PAM
uguucccaaacccucagugg

SEQ ID NO: 9956 - RNA, 20 nt, Artificial Sequence
  targeting sequence with CTCN PAM
ccuguucccaaacccucagu

SEQ ID NO: 9957 - RNA, 20 nt, Artificial Sequence
  targeting sequence with CTCN PAM
cucuccuguucccaaacccu

SEQ ID NO: 9958 - RNA, 20 nt, Artificial Sequence
  targeting sequence with CTCN PAM
cccucacucuccuguuccca

SEQ ID NO: 9959 - RNA, 20 nt, Artificial Sequence
  targeting sequence with CTCN PAM
ucuuuccugaacauccaucc

SEQ ID NO: 9960 - RNA, 20 nt, Artificial Sequence
  targeting sequence with CTCN PAM
ccuggacaagggcaccagcc

SEQ ID NO: 9961 - RNA, 20 nt, Artificial Sequence
  targeting sequence with CTCN PAM
ccccuggacaagggcaccag

SEQ ID NO: 9962 - RNA, 20 nt, Artificial Sequence
  targeting sequence with CTCN PAM
gucagguucagggguccugg

SEQ ID NO: 9963 - RNA, 20 nt, Artificial Sequence
  targeting sequence with CTCN PAM
aagccaggaccccugaaccu

SEQ ID NO: 9964 - RNA, 20 nt, Artificial Sequence
  targeting sequence with CTCN PAM
aaucacgcuccccuuuggaa

SEQ ID NO: 9965 - RNA, 20 nt, Artificial Sequence
  targeting sequence with CTCN PAM
ccuuuggaagugcucagccg

SEQ ID NO: 9966 - RNA, 20 nt, Artificial Sequence
  targeting sequence with CTCN PAM
gccgaugagcucacaggcac

SEQ ID NO: 9967 - RNA, 20 nt, Artificial Sequence
  targeting sequence with CTCN PAM
ucggcugagcacuuccaaag

SEQ ID NO: 9968 - RNA, 20 nt, Artificial Sequence
  targeting sequence with CTCN PAM
caggcacaugucaguuugaa

SEQ ID NO: 9969 - RNA, 20 nt, Artificial Sequence
  targeting sequence with CTCN PAM
augaagcgcaccucaaagag

SEQ ID NO: 9970 - RNA, 20 nt, Artificial Sequence
  targeting sequence with CTCN PAM
aagagcaccauuuugcagcu

SEQ ID NO: 9971 - RNA, 20 nt, Artificial Sequence
  targeting sequence with CTCN PAM
uugaggugcgcuucauggag

SEQ ID NO: 9972 - RNA, 20 nt, Artificial Sequence
  targeting sequence with CTCN PAM
gcauguccagccugcaguuc

SEQ ID NO: 9973 - RNA, 20 nt, Artificial Sequence
  targeting sequence with CTCN PAM
gggcagccacucagcauguc

SEQ ID NO: 9974 - RNA, 20 nt, Artificial Sequence
  targeting sequence with CTCN PAM
auguccuagcugcaagggcu

SEQ ID NO: 9975 - RNA, 20 nt, Artificial Sequence
  targeting sequence with CTCN PAM
gaacaugguaggguuguggu

SEQ ID NO: 9976 - RNA, 20 nt, Artificial Sequence
  targeting sequence with CTCN PAM
augcuggggcuucgcacgug

SEQ ID NO: 9977 - RNA, 20 nt, Artificial Sequence
  targeting sequence with CTCN PAM
cagggacacugugaagauga

SEQ ID NO: 9978 - RNA, 20 nt, Artificial Sequence
  targeting sequence with CTCN PAM
uuccaucuuacaaaugagua

SEQ ID NO: 9979 - RNA, 20 nt, Artificial Sequence
  targeting sequence with CTCN PAM
uuuguaagauggaaagagaa

SEQ ID NO: 9980 - RNA, 20 nt, Artificial Sequence
  targeting sequence with CTCN PAM
guuuacucauuuguaagaug

SEQ ID NO: 9981 - RNA, 20 nt, Artificial Sequence
  targeting sequence with CTCN PAM
guguagcuaaguaaccacua

SEQ ID NO: 9982 - RNA, 20 nt, Artificial Sequence
  targeting sequence with CTCN PAM
uaagcccauggagggcauuc

SEQ ID NO: 9983 - RNA, 20 nt, Artificial Sequence
  targeting sequence with CTCN PAM
augggcuuaggagucagaca

SEQ ID NO: 9984 - RNA, 20 nt, Artificial Sequence
  targeting sequence with CTCN PAM
gaaugcccuccaugggcuua

SEQ ID NO: 9985 - RNA, 20 nt, Artificial Sequence
  targeting sequence with CTCN PAM
cuaugcagccagcaggcaga

SEQ ID NO: 9986 - RNA, 20 nt, Artificial Sequence
  targeting sequence with CTCN PAM
ccccagccccucccuaugca

SEQ ID NO: 9987 - RNA, 20 nt, Artificial Sequence
  targeting sequence with CTCN PAM
aacuccccccagccccuccc

SEQ ID NO: 9988 - RNA, 20 nt, Artificial Sequence
  targeting sequence with CTCN PAM
ggccauagagccccugccuc

SEQ ID NO: 9989 - RNA, 20 nt, Artificial Sequence
  targeting sequence with CTCN PAM
auggccugagaugcucaaac

SEQ ID NO: 9990 - RNA, 20 nt, Artificial Sequence
  targeting sequence with CTCN PAM
cugucuccaucucugggugg

SEQ ID NO: 9991 - RNA, 20 nt, Artificial Sequence
  targeting sequence with CTCN PAM
aucucuggguggaaagaugg

SEQ ID NO: 9992 - RNA, 20 nt, Artificial Sequence
  targeting sequence with CTCN PAM
ggguggaaagaugguguuuu

SEQ ID NO: 9993 - RNA, 20 nt, Artificial Sequence
  targeting sequence with CTCN PAM
gggaaaacaccaucuuucca

SEQ ID NO: 9994 - RNA, 20 nt, Artificial Sequence
  targeting sequence with CTCN PAM
gagagguugaauggcucucc

SEQ ID NO: 9995 - RNA, 20 nt, Artificial Sequence
  targeting sequence with CTCN PAM
gagccuuaguuucucaggga

SEQ ID NO: 9996 - RNA, 20 nt, Artificial Sequence
  targeting sequence with CTCN PAM
cugagccuuaguuucucagg

SEQ ID NO: 9997 - RNA, 20 nt, Artificial Sequence
  targeting sequence with CTCN PAM
cccaaggucacacagcuggu

SEQ ID NO: 9998 - RNA, 20 nt, Artificial Sequence
  targeting sequence with CTCN PAM
caaggucacacagcugguca

SEQ ID NO: 9999 - RNA, 20 nt, Artificial Sequence
  targeting sequence with CTCN PAM
gcagcugaccagcuguguga

SEQ ID NO: 10000 - RNA, 20 nt, Artificial Sequence
  targeting sequence with CTCN PAM
acucugcagcugaccagcug

SEQ ID NO: 10001 - RNA, 20 nt, Artificial Sequence
  targeting sequence with CTCN PAM
uguguucucaacucugcagc

SEQ ID NO: 10002 - RNA, 20 nt, Artificial Sequence
  targeting sequence with CTCN PAM
ggccagcaucucuuuuuuuc

SEQ ID NO: 10003 - RNA, 20 nt, Artificial Sequence
  targeting sequence with CTCN PAM
uuuuuucuuugaguuguuuc

SEQ ID NO: 10004 - RNA, 20 nt, Artificial Sequence
  targeting sequence with CTCN PAM
aagaaaaaaagagaugcugg

SEQ ID NO: 10005 - RNA, 20 nt, Artificial Sequence
  targeting sequence with CTCN PAM
ugccucagaccuuaaagaga

SEQ ID NO: 10006 - RNA, 20 nt, Artificial Sequence
  targeting sequence with CTCN PAM
gaccuuaaagagagaggguc

SEQ ID NO: 10007 - RNA, 20 nt, Artificial Sequence
  targeting sequence with CTCN PAM
uuaaggucugaggcaagagc

SEQ ID NO: 10008 - RNA, 20 nt, Artificial Sequence
  targeting sequence with CTCN PAM
cuuuaaggucugaggcaaga

SEQ ID NO: 10009 - RNA, 20 nt, Artificial Sequence
  targeting sequence with CTCN PAM
cucuuuaaggucugaggcaa

SEQ ID NO: 10010 - RNA, 20 nt, Artificial Sequence
  targeting sequence with CTCN PAM
agugcccauccccaucagac

SEQ ID NO: 10011 - RNA, 20 nt, Artificial Sequence
  targeting sequence with CTCN PAM
gucuccagugcccaucccca

SEQ ID NO: 10012 - RNA, 20 nt, Artificial Sequence
  targeting sequence with CTCN PAM
gaugugaaaugcugggaugc

SEQ ID NO: 10013 - RNA, 20 nt, Artificial Sequence
  targeting sequence with CTCN PAM
gccccaggcugcagcuccca

SEQ ID NO: 10014 - RNA, 20 nt, Artificial Sequence
  targeting sequence with CTCN PAM
cacugggagguggaggaccu

SEQ ID NO: 10015 - RNA, 20 nt, Artificial Sequence
  targeting sequence with CTCN PAM
cagugggagcugcagccugg

SEQ ID NO: 10016 - RNA, 20 nt, Artificial Sequence
  targeting sequence with CTCN PAM
accucccagugggagcugca

SEQ ID NO: 10017 - RNA, 20 nt, Artificial Sequence
  targeting sequence with CTCN PAM
gcacaggcggcuugugggug

SEQ ID NO: 10018 - RNA, 20 nt, Artificial Sequence
  targeting sequence with CTCN PAM
uggccucagcacaggcggcu

SEQ ID NO: 10019 - RNA, 20 nt, Artificial Sequence
  targeting sequence with CTCN PAM
cuguggcccacgcacugguu

SEQ ID NO: 10020 - RNA, 20 nt, Artificial Sequence
  targeting sequence with CTCN PAM
uugacuuugcauuccagacc

SEQ ID NO: 10021 - RNA, 20 nt, Artificial Sequence
  targeting sequence with CTCN PAM
ggagcaggugaagaggcccg

SEQ ID NO: 10022 - RNA, 20 nt, Artificial Sequence
  targeting sequence with CTCN PAM
ugaggggccgggauuccaug

SEQ ID NO: 10023 - RNA, 20 nt, Artificial Sequence
  targeting sequence with CTCN PAM
ucaccugcuccugaggggcc

SEQ ID NO: 10024 - RNA, 20 nt, Artificial Sequence
  targeting sequence with CTCN PAM
cgggccucuucaccugcucc

SEQ ID NO: 10025 - RNA, 20 nt, Artificial Sequence
  targeting sequence with CTCN PAM
ccugcacagcuuuucugugu

SEQ ID NO: 10026 - RNA, 20 nt, Artificial Sequence
  targeting sequence with CTCN PAM
ugcacagcuuuucuguguca

SEQ ID NO: 10027 - RNA, 20 nt, Artificial Sequence
  targeting sequence with CTCN PAM
guguggcugggucuguuuuu

SEQ ID NO: 10028 - RNA, 20 nt, Artificial Sequence
  targeting sequence with CTCN PAM
acuuggaguagaaugugcau

SEQ ID NO: 10029 - RNA, 20 nt, Artificial Sequence
  targeting sequence with CTCN PAM
aaguggagugggguacccag

SEQ ID NO: 10030 - RNA, 20 nt, Artificial Sequence
  targeting sequence with CTCN PAM
gaaaaaaauagaucaaucaa

SEQ ID NO: 10031 - RNA, 20 nt, Artificial Sequence
  targeting sequence with CTCN PAM
aauuccugggcucaagcaau

SEQ ID NO: 10032 - RNA, 20 nt, Artificial Sequence
  targeting sequence with CTCN PAM
agcaauccucuggucucagc

SEQ ID NO: 10033 - RNA, 20 nt, Artificial Sequence
  targeting sequence with CTCN PAM
ggucucagccuccccaagug

SEQ ID NO: 10034 - RNA, 20 nt, Artificial Sequence
  targeting sequence with CTCN PAM
gccuccccaaguguugggau

SEQ ID NO: 10035 - RNA, 20 nt, Artificial Sequence
  targeting sequence with CTCN PAM
ccaaguguugggauuauagg

SEQ ID NO: 10036 - RNA, 20 nt, Artificial Sequence
  targeting sequence with CTCN PAM
ugccuauaaucccaacacuu

SEQ ID NO: 10037 - RNA, 20 nt, Artificial Sequence
  targeting sequence with CTCN PAM
cugaucuauuuaacaaaccu

SEQ ID NO: 10038 - RNA, 20 nt, Artificial Sequence
  targeting sequence with CTCN PAM
gaucuauuuaacaaaccugc

SEQ ID NO: 10039 - RNA, 20 nt, Artificial Sequence
  targeting sequence with CTCN PAM
cagcagguuuguuaaauaga

SEQ ID NO: 10040 - RNA, 20 nt, Artificial Sequence
  targeting sequence with CTCN PAM
gggucaggagcagcacuggg

SEQ ID NO: 10041 - RNA, 20 nt, Artificial Sequence
  targeting sequence with CTCN PAM
ugacccugagacccucccag

SEQ ID NO: 10042 - RNA, 20 nt, Artificial Sequence
  targeting sequence with CTCN PAM
gaggacacagagcucacuca

SEQ ID NO: 10043 - RNA, 20 nt, Artificial Sequence
  targeting sequence with CTCN PAM
gagcccagugcugcuccuga

SEQ ID NO: 10044 - RNA, 20 nt, Artificial Sequence
  targeting sequence with CTCN PAM
guguccucagagcccagugc

SEQ ID NO: 10045 - RNA, 20 nt, Artificial Sequence
  targeting sequence with CTCN PAM
cucagccgugacccagaggg

SEQ ID NO: 10046 - RNA, 20 nt, Artificial Sequence
  targeting sequence with CTCN PAM
gccgugacccagagggggug

SEQ ID NO: 10047 - RNA, 20 nt, Artificial Sequence
  targeting sequence with CTCN PAM
gggucacggcugagugagcu

SEQ ID NO: 10048 - RNA, 20 nt, Artificial Sequence
  targeting sequence with CTCN PAM
ggcacccccucugggucacg

SEQ ID NO: 10049 - RNA, 20 nt, Artificial Sequence
  targeting sequence with CTCN PAM
gcagggccuuuucuugccuu

SEQ ID NO: 10050 - RNA, 20 nt, Artificial Sequence
  targeting sequence with CTCN PAM
gguuucuagaaggcccggcu

SEQ ID NO: 10051 - RNA, 20 nt, Artificial Sequence
  targeting sequence with CTCN PAM
ccuuaaaagccaguaggagc

SEQ ID NO: 10052 - RNA, 20 nt, Artificial Sequence
  targeting sequence with CTCN PAM
uuaaaagccaguaggagcuc

SEQ ID NO: 10053 - RNA, 20 nt, Artificial Sequence
  targeting sequence with CTCN PAM
uacuggcuuuuaaggagagu

SEQ ID NO: 10054 - RNA, 20 nt, Artificial Sequence
  targeting sequence with CTCN PAM
ucaaaaggcagcccuaagga

SEQ ID NO: 10055 - RNA, 20 nt, Artificial Sequence
  targeting sequence with CTCN PAM
aaaggcagcccuaaggaguc

SEQ ID NO: 10056 - RNA, 20 nt, Artificial Sequence
  targeting sequence with CTCN PAM
uuagggcugccuuuugagga

SEQ ID NO: 10057 - RNA, 20 nt, Artificial Sequence
  targeting sequence with CTCN PAM
uaaaugaacucagagucagu

SEQ ID NO: 10058 - RNA, 20 nt, Artificial Sequence
  targeting sequence with CTCN PAM
gagucaguuuuaaaaugcaa

SEQ ID NO: 10059 - RNA, 20 nt, Artificial Sequence
  targeting sequence with CTCN PAM
gaguucauuuaagaguggac

SEQ ID NO: 10060 - RNA, 20 nt, Artificial Sequence
  targeting sequence with CTCN PAM
agagcaaaagacagucuugg

SEQ ID NO: 10061 - RNA, 20 nt, Artificial Sequence
  targeting sequence with CTCN PAM
aggaaugcaccauccagacc

SEQ ID NO: 10062 - RNA, 20 nt, Artificial Sequence
  targeting sequence with CTCN PAM
cgaggaaugcaccauccaga

SEQ ID NO: 10063 - RNA, 20 nt, Artificial Sequence
  targeting sequence with CTCN PAM
guguacccagggcaagugga

SEQ ID NO: 10064 - RNA, 20 nt, Artificial Sequence
  targeting sequence with CTCN PAM
uccuggcacuggggagggau

SEQ ID NO: 10065 - RNA, 20 nt, Artificial Sequence
  targeting sequence with CTCN PAM
ccagugccaggaagagcacc

SEQ ID NO: 10066 - RNA, 20 nt, Artificial Sequence
  targeting sequence with CTCN PAM
ugggccuguaucccucccca

SEQ ID NO: 10067 - RNA, 20 nt, Artificial Sequence
  targeting sequence with CTCN PAM
cuccuggagcaucuauuuua

SEQ ID NO: 10068 - RNA, 20 nt, Artificial Sequence
  targeting sequence with CTCN PAM
uggagcaucuauuuuagugg

SEQ ID NO: 10069 - RNA, 20 nt, Artificial Sequence
  targeting sequence with CTCN PAM
aggagggagaacagcauguc

SEQ ID NO: 10070 - RNA, 20 nt, Artificial Sequence
  targeting sequence with CTCN PAM
acuaaaauagaugcuccagg

SEQ ID NO: 10071 - RNA, 20 nt, Artificial Sequence
  targeting sequence with CTCN PAM
auauuaaugguuuguuuucu

SEQ ID NO: 10072 - RNA, 20 nt, Artificial Sequence
  targeting sequence with CTCN PAM
aucgcaucuuuucaguacuc

SEQ ID NO: 10073 - RNA, 20 nt, Artificial Sequence
  targeting sequence with CTCN PAM
caccccauucccuuccuugc

SEQ ID NO: 10074 - RNA, 20 nt, Artificial Sequence
  targeting sequence with CTCN PAM
cccaccccauucccuuccuu

SEQ ID NO: 10075 - RNA, 20 nt, Artificial Sequence
  targeting sequence with CTCN PAM
cucccaccccauucccuucc

SEQ ID NO: 10076 - RNA, 20 nt, Artificial Sequence
  targeting sequence with CTCN PAM
ugaccucucucccaccccau

SEQ ID NO: 10077 - RNA, 20 nt, Artificial Sequence
  targeting sequence with CTCN PAM
ccugaccucucucccacccc

SEQ ID NO: 10078 - RNA, 20 nt, Artificial Sequence
  targeting sequence with CTCN PAM
cugacaagguggacgaaaca

SEQ ID NO: 10079 - RNA, 20 nt, Artificial Sequence
  targeting sequence with CTCN PAM
uggccuguuucguccaccuu

SEQ ID NO: 10080 - RNA, 20 nt, Artificial Sequence
  targeting sequence with CTCN PAM
gccucauggccuguuucguc

SEQ ID NO: 10081 - RNA, 20 nt, Artificial Sequence
  targeting sequence with CTCN PAM
cugcacauccccaccugggg

SEQ ID NO: 10082 - RNA, 20 nt, Artificial Sequence
  targeting sequence with CTCN PAM
gguuuccugguacucccugc

SEQ ID NO: 10083 - RNA, 20 nt, Artificial Sequence
  targeting sequence with CTCN PAM
cugguuuccugguacucccu

SEQ ID NO: 10084 - RNA, 20 nt, Artificial Sequence
  targeting sequence with CTCN PAM
uaacuauucccaccucucug

SEQ ID NO: 10085 - RNA, 20 nt, Artificial Sequence
  targeting sequence with CTCN PAM
gaggggacagggccaaguca

SEQ ID NO: 10086 - RNA, 20 nt, Artificial Sequence
  targeting sequence with CTCN PAM
gaggcaccccccaucucaua

SEQ ID NO: 10087 - RNA, 20 nt, Artificial Sequence
  targeting sequence with CTCN PAM
ccugacuuggcccugucccc

SEQ ID NO: 10088 - RNA, 20 nt, Artificial Sequence
  targeting sequence with CTCN PAM
ggucucaccugacuuggccc

SEQ ID NO: 10089 - RNA, 20 nt, Artificial Sequence
  targeting sequence with CTCN PAM
cugcugacugugacccucag

SEQ ID NO: 10090 - RNA, 20 nt, Artificial Sequence
  targeting sequence with CTCN PAM
gaggaguguggucuggccug

SEQ ID NO: 10091 - RNA, 20 nt, Artificial Sequence
  targeting sequence with CTCN PAM
gaggccagaccccugcaugg

SEQ ID NO: 10092 - RNA, 20 nt, Artificial Sequence
  targeting sequence with CTCN PAM
ucugaggccagaccccugca

SEQ ID NO: 10093 - RNA, 20 nt, Artificial Sequence
  targeting sequence with CTCN PAM
cacuguggccuagcugcuga

SEQ ID NO: 10094 - RNA, 20 nt, Artificial Sequence
  targeting sequence with CTCN PAM
cuguggccuagcugcugagc

SEQ ID NO: 10095 - RNA, 20 nt, Artificial Sequence
  targeting sequence with CTCN PAM
gcagcuaggccacagugaga

SEQ ID NO: 10096 - RNA, 20 nt, Artificial Sequence
  targeting sequence with CTCN PAM
gcucagcagcuaggccacag

SEQ ID NO: 10097 - RNA, 20 nt, Artificial Sequence
  targeting sequence with CTCN PAM
ucucagcucagcagcuaggc

SEQ ID NO: 10098 - RNA, 20 nt, Artificial Sequence
  targeting sequence with CTCN PAM
cugcuucugcccaagguccu

SEQ ID NO: 10099 - RNA, 20 nt, Artificial Sequence
  targeting sequence with CTCN PAM
agucucccugcuucugccca

SEQ ID NO: 10100 - RNA, 20 nt, Artificial Sequence
  targeting sequence with CTCN PAM
cuccagucucccugcuucug

SEQ ID NO: 10101 - RNA, 20 nt, Artificial Sequence
  targeting sequence with CTCN PAM
accgccucccuccagucucc

SEQ ID NO: 10102 - RNA, 20 nt, Artificial Sequence
  targeting sequence with CTCN PAM
ggcuggagucugaagggagc

SEQ ID NO: 10103 - RNA, 20 nt, Artificial Sequence
  targeting sequence with CTCN PAM
agccugagccccgccccaac

SEQ ID NO: 10104 - RNA, 20 nt, Artificial Sequence
  targeting sequence with CTCN PAM
cuucagacuccagccugagc

SEQ ID NO: 10105 - RNA, 20 nt, Artificial Sequence
  targeting sequence with CTCN PAM
cacccacauccacccaccag

SEQ ID NO: 10106 - RNA, 20 nt, Artificial Sequence
  targeting sequence with CTCN PAM
cccacccacauccacccacc

SEQ ID NO: 10107 - RNA, 20 nt, Artificial Sequence
  targeting sequence with CTCN PAM
cccucucccacccacaucca

SEQ ID NO: 10108 - RNA, 20 nt, Artificial Sequence
  targeting sequence with CTCN PAM
ggccccuggacagauggagu

SEQ ID NO: 10109 - RNA, 20 nt, Artificial Sequence
  targeting sequence with CTCN PAM
aucuguccaggggcccgagc

SEQ ID NO: 10110 - RNA, 20 nt, Artificial Sequence
  targeting sequence with CTCN PAM
gaaacugauggccccauagc

SEQ ID NO: 10111 - RNA, 20 nt, Artificial Sequence
  targeting sequence with CTCN PAM
ucccucugaaacugauggcc

SEQ ID NO: 10112 - RNA, 20 nt, Artificial Sequence
  targeting sequence with CTCN PAM
acggcccucaaaccaggcau

SEQ ID NO: 10113 - RNA, 20 nt, Artificial Sequence
  targeting sequence with CTCN PAM
aaccaggcaugaagcaggag

SEQ ID NO: 10114 - RNA, 20 nt, Artificial Sequence
  targeting sequence with CTCN PAM
ugcuucaugccugguuugag

SEQ ID NO: 10115 - RNA, 20 nt, Artificial Sequence
  targeting sequence with CTCN PAM
cguguuuggucagccauggu

SEQ ID NO: 10116 - RNA, 20 nt, Artificial Sequence
  targeting sequence with CTCN PAM
cacccaggcgguucugcacc

SEQ ID NO: 10117 - RNA, 20 nt, Artificial Sequence
  targeting sequence with CTCN PAM
caccccgcaccucccaccca

SEQ ID NO: 10118 - RNA, 20 nt, Artificial Sequence
  targeting sequence with CTCN PAM
gagccagcgagggccgucug

SEQ ID NO: 10119 - RNA, 20 nt, Artificial Sequence
  targeting sequence with CTCN PAM
gagcccauuugggacacaac

SEQ ID NO: 10120 - RNA, 20 nt, Artificial Sequence
  targeting sequence with CTCN PAM
cuggcucagagcccauuugg

SEQ ID NO: 10121 - RNA, 20 nt, Artificial Sequence
  targeting sequence with CTCN PAM
cagaaggaugucggagggag

SEQ ID NO: 10122 - RNA, 20 nt, Artificial Sequence
  targeting sequence with CTCN PAM
gacauccuucugugaggcca

SEQ ID NO: 10123 - RNA, 20 nt, Artificial Sequence
  targeting sequence with CTCN PAM
cuccgacauccuucugugag

SEQ ID NO: 10124 - RNA, 20 nt, Artificial Sequence
  targeting sequence with CTCN PAM
ggcucuggcaggugaccgug

SEQ ID NO: 10125 - RNA, 20 nt, Artificial Sequence
  targeting sequence with CTCN PAM
ggcaggugaccguggccugc

SEQ ID NO: 10126 - RNA, 20 nt, Artificial Sequence
  targeting sequence with CTCN PAM
caggccacggucaccugcca

SEQ ID NO: 10127 - RNA, 20 nt, Artificial Sequence
  targeting sequence with CTCN PAM
ucgcaggccacggucaccug

SEQ ID NO: 10128 - RNA, 20 nt, Artificial Sequence
  targeting sequence with CTCN PAM
cugggaccucccacguccug

SEQ ID NO: 10129 - RNA, 20 nt, Artificial Sequence
  targeting sequence with CTCN PAM
cacguccugggggccuacgc

SEQ ID NO: 10130 - RNA, 20 nt, Artificial Sequence
  targeting sequence with CTCN PAM
ugacuacacacguguugucu

SEQ ID NO: 10131 - RNA, 20 nt, Artificial Sequence
  targeting sequence with CTCN PAM
ggcagcagauggcaacggcu

SEQ ID NO: 10132 - RNA, 20 nt, Artificial Sequence
  targeting sequence with CTCN PAM
caggagcuccagugacagcc

SEQ ID NO: 10133 - RNA, 20 nt, Artificial Sequence
  targeting sequence with CTCN PAM
ugggaggccugcgccaggug

SEQ ID NO: 10134 - RNA, 20 nt, Artificial Sequence
  targeting sequence with CTCN PAM
agugacagccccaucccagg

SEQ ID NO: 10135 - RNA, 20 nt, Artificial Sequence
  targeting sequence with CTCN PAM
ccagacacccauccugggau

SEQ ID NO: 10136 - RNA, 20 nt, Artificial Sequence
  targeting sequence with CTCN PAM
gccccagcccuugacccucc

SEQ ID NO: 10137 - RNA, 20 nt, Artificial Sequence
  targeting sequence with CTCN PAM
cucagcccuccauggccugg

SEQ ID NO: 10138 - RNA, 20 nt, Artificial Sequence
  targeting sequence with CTCN PAM
cagcccuccauggccuggca

SEQ ID NO: 10139 - RNA, 20 nt, Artificial Sequence
  targeting sequence with CTCN PAM
gcccuccauggccuggcacg

SEQ ID NO: 10140 - RNA, 20 nt, Artificial Sequence
  targeting sequence with CTCN PAM
auggccuggcacgaggggau

SEQ ID NO: 10141 - RNA, 20 nt, Artificial Sequence
  targeting sequence with CTCN PAM
ugccaggccauggagggcug

SEQ ID NO: 10142 - RNA, 20 nt, Artificial Sequence
  targeting sequence with CTCN PAM
agggccaggccagcagcccc

SEQ ID NO: 10143 - RNA, 20 nt, Artificial Sequence
  targeting sequence with CTCN PAM
uugccuggaacucacucacu

SEQ ID NO: 10144 - RNA, 20 nt, Artificial Sequence
  targeting sequence with CTCN PAM
cucacucugggugccuccuc

SEQ ID NO: 10145 - RNA, 20 nt, Artificial Sequence
  targeting sequence with CTCN PAM
cucugggugccuccucccca

SEQ ID NO: 10146 - RNA, 20 nt, Artificial Sequence
  targeting sequence with CTCN PAM
gggugccuccuccccaggug

SEQ ID NO: 10147 - RNA, 20 nt, Artificial Sequence
  targeting sequence with CTCN PAM
uccccagguggaggugccag

SEQ ID NO: 10148 - RNA, 20 nt, Artificial Sequence
  targeting sequence with CTCN PAM
ccagguggaggugccaggaa

SEQ ID NO: 10149 - RNA, 20 nt, Artificial Sequence
  targeting sequence with CTCN PAM
accuggggaggaggcaccca

SEQ ID NO: 10150 - RNA, 20 nt, Artificial Sequence
  targeting sequence with CTCN PAM
cucccucacuguggggcauu

SEQ ID NO: 10151 - RNA, 20 nt, Artificial Sequence
  targeting sequence with CTCN PAM
cucacuguggggcauuucac

SEQ ID NO: 10152 - RNA, 20 nt, Artificial Sequence
  targeting sequence with CTCN PAM
cuguggggcauuucaccauu

SEQ ID NO: 10153 - RNA, 20 nt, Artificial Sequence
  targeting sequence with CTCN PAM
accuguuugaauggugaaau

SEQ ID NO: 10154 - RNA, 20 nt, Artificial Sequence
  targeting sequence with CTCN PAM
ggugcugccagcugcuccca

SEQ ID NO: 10155 - RNA, 20 nt, Artificial Sequence
  targeting sequence with CTCN PAM
caaugugccgauguccgugg

SEQ ID NO: 10156 - RNA, 20 nt, Artificial Sequence
  targeting sequence with CTCN PAM
auaaaagucauucugcccac

SEQ ID NO: 10157 - RNA, 20 nt, Artificial Sequence
  targeting sequence with CTCN PAM
uguuccgugccaggcauuca

SEQ ID NO: 10158 - RNA, 20 nt, Artificial Sequence
  targeting sequence with CTCN PAM
ggucuccaccaaggaggcag

SEQ ID NO: 10159 - RNA, 20 nt, Artificial Sequence
  targeting sequence with CTCN PAM
accaaggaggcaggauucuu

SEQ ID NO: 10160 - RNA, 20 nt, Artificial Sequence
  targeting sequence with CTCN PAM
uugguggagaccugaggauu

SEQ ID NO: 10161 - RNA, 20 nt, Artificial Sequence
  targeting sequence with CTCN PAM
ccuauccaugggaagaaucc

SEQ ID NO: 10162 - RNA, 20 nt, Artificial Sequence
  targeting sequence with CTCN PAM
ccccccaacgauguuugucc

SEQ ID NO: 10163 - RNA, 20 nt, Artificial Sequence
  targeting sequence with CTCN PAM
ucuccagcuaacuguggaga

SEQ ID NO: 10164 - RNA, 20 nt, Artificial Sequence
  targeting sequence with CTCN PAM
agcuaacuguggagaagccc

SEQ ID NO: 10165 - RNA, 20 nt, Artificial Sequence
  targeting sequence with CTCN PAM
acaguuagcuggagaugagg

SEQ ID NO: 10166 - RNA, 20 nt, Artificial Sequence
  targeting sequence with CTCN PAM
cugauuaauggaggcuuagc

SEQ ID NO: 10167 - RNA, 20 nt, Artificial Sequence
  targeting sequence with CTCN PAM
auuaaucagggagcccccag

SEQ ID NO: 10168 - RNA, 20 nt, Artificial Sequence
  targeting sequence with CTCN PAM
ggcuagaugccauccagaaa

SEQ ID NO: 10169 - RNA, 20 nt, Artificial Sequence
  targeting sequence with CTCN PAM
agccucuggcuagaugccau

SEQ ID NO: 10170 - RNA, 20 nt, Artificial Sequence
  targeting sequence with CTCN PAM
ggaaaccaaggcacagccug

SEQ ID NO: 10171 - RNA, 20 nt, Artificial Sequence
  targeting sequence with CTCN PAM
gcucuaugccaggcugugcu

SEQ ID NO: 10172 - RNA, 20 nt, Artificial Sequence
  targeting sequence with CTCN PAM
augccaggcugugcuagcaa

SEQ ID NO: 10173 - RNA, 20 nt, Artificial Sequence
  targeting sequence with CTCN PAM
ccgcaggccaccuuugggug

SEQ ID NO: 10174 - RNA, 20 nt, Artificial Sequence
  targeting sequence with CTCN PAM
gcagugugcaguggugcaug

SEQ ID NO: 10175 - RNA, 20 nt, Artificial Sequence
  targeting sequence with CTCN PAM
gccaacccgcuccacuaccc

SEQ ID NO: 10176 - RNA, 20 nt, Artificial Sequence
  targeting sequence with CTCN PAM
acuacccggcaggguacaca

SEQ ID NO: 10177 - RNA, 20 nt, Artificial Sequence
  targeting sequence with CTCN PAM
gugaaguaggggugcgaaug

SEQ ID NO: 10178 - RNA, 20 nt, Artificial Sequence
  targeting sequence with CTCN PAM
gguuccagguuucuuccucu

SEQ ID NO: 10179 - RNA, 20 nt, Artificial Sequence
  targeting sequence with CTCN PAM
cacagcaggaacugagccag

SEQ ID NO: 10180 - RNA, 20 nt, Artificial Sequence
  targeting sequence with CTCN PAM
guuccugcugugugagcuug

SEQ ID NO: 10181 - RNA, 20 nt, Artificial Sequence
  targeting sequence with CTCN PAM
gaagccaagccucuucuuac

SEQ ID NO: 10182 - RNA, 20 nt, Artificial Sequence
  targeting sequence with CTCN PAM
ucuuacuucacccggcuggg

SEQ ID NO: 10183 - RNA, 20 nt, Artificial Sequence
  targeting sequence with CTCN PAM
ucauuuuuacggguaacagu

SEQ ID NO: 10184 - RNA, 20 nt, Artificial Sequence
  targeting sequence with CTCN PAM
uuuuuacggguaacagugag

SEQ ID NO: 10185 - RNA, 20 nt, Artificial Sequence
  targeting sequence with CTCN PAM
cuguuacccguaaaaaugag

SEQ ID NO: 10186 - RNA, 20 nt, Artificial Sequence
  targeting sequence with CTCN PAM
gugagugauggcagaacgau

SEQ ID NO: 10187 - RNA, 20 nt, Artificial Sequence
  targeting sequence with CTCN PAM
ccgagcuuccuggucugugu

SEQ ID NO: 10188 - RNA, 20 nt, Artificial Sequence
  targeting sequence with CTCN PAM
gccaggccagugaaucaggc

SEQ ID NO: 10189 - RNA, 20 nt, Artificial Sequence
  targeting sequence with CTCN PAM
cccgaccaugccuuagaagc

SEQ ID NO: 10190 - RNA, 20 nt, Artificial Sequence
  targeting sequence with CTCN PAM
cccccgaccaugccuuagaa

SEQ ID NO: 10191 - RNA, 20 nt, Artificial Sequence
  targeting sequence with CTCN PAM
uugagcaccagccccaccca

SEQ ID NO: 10192 - RNA, 20 nt, Artificial Sequence
  targeting sequence with CTCN PAM
aggagggacaguuguuggcc

SEQ ID NO: 10193 - RNA, 20 nt, Artificial Sequence
  targeting sequence with CTCN PAM
cuguugccuuuuuacagcca

SEQ ID NO: 10194 - RNA, 20 nt, Artificial Sequence
  targeting sequence with CTCN PAM
guugccuuuuuacagccaac

SEQ ID NO: 10195 - RNA, 20 nt, Artificial Sequence
  targeting sequence with CTCN PAM
ugcauagacuugacugccua

SEQ ID NO: 10196 - RNA, 20 nt, Artificial Sequence
  targeting sequence with CTCN PAM
acuauucaacaaacuuaccc

SEQ ID NO: 10197 - RNA, 20 nt, Artificial Sequence
  targeting sequence with CTCN PAM
ucaaauacuuggcuuacuca

SEQ ID NO: 10198 - RNA, 20 nt, Artificial Sequence
  targeting sequence with CTCN PAM
agauaaaaguacucaucaaa

SEQ ID NO: 10199 - RNA, 20 nt, Artificial Sequence
  targeting sequence with CTCN PAM
uugugccuauccuaggaaug

SEQ ID NO: 10200 - RNA, 20 nt, Artificial Sequence
  targeting sequence with CTCN PAM
ccugaccacccugacaguca

SEQ ID NO: 10201 - RNA, 20 nt, Artificial Sequence
  targeting sequence with CTCN PAM
uccuuggugacaggugcccu

SEQ ID NO: 10202 - RNA, 20 nt, Artificial Sequence
  targeting sequence with CTCN PAM
uuggugacaggugcccuaca

SEQ ID NO: 10203 - RNA, 20 nt, Artificial Sequence
  targeting sequence with CTCN PAM
agaugcucuguuguccugac

SEQ ID NO: 10204 - RNA, 20 nt, Artificial Sequence
  targeting sequence with CTCN PAM
guuguccugaccucccaaug

SEQ ID NO: 10205 - RNA, 20 nt, Artificial Sequence
  targeting sequence with CTCN PAM
caaugcccuuuucauucuuu

SEQ ID NO: 10206 - RNA, 20 nt, Artificial Sequence
  targeting sequence with CTCN PAM
ccaguaccuggcacacagcc

SEQ ID NO: 10207 - RNA, 20 nt, Artificial Sequence
  targeting sequence with CTCN PAM
ggccaggcugugugccaggu

SEQ ID NO: 10208 - RNA, 20 nt, Artificial Sequence
  targeting sequence with CTCN PAM
uuacagaagcaucuggcacu

SEQ ID NO: 10209 - RNA, 20 nt, Artificial Sequence
  targeting sequence with CTCN PAM
gauugggugcaauggcucac

SEQ ID NO: 10210 - RNA, 20 nt, Artificial Sequence
  targeting sequence with CTCN PAM
caccuguaaucucaguacuu

SEQ ID NO: 10211 - RNA, 20 nt, Artificial Sequence
  targeting sequence with CTCN PAM
guacuuugggaggcugaggc

SEQ ID NO: 10212 - RNA, 20 nt, Artificial Sequence
  targeting sequence with CTCN PAM
caaaguacugagauuacagg

SEQ ID NO: 10213 - RNA, 20 nt, Artificial Sequence
  targeting sequence with CTCN PAM
gccucccaaaguacugagau

SEQ ID NO: 10214 - RNA, 20 nt, Artificial Sequence
  targeting sequence with CTCN PAM
ugccucagccucccaaagua

SEQ ID NO: 10215 - RNA, 20 nt, Artificial Sequence
  targeting sequence with CTCN PAM
cuguugcccagggucuugaa

SEQ ID NO: 10216 - RNA, 20 nt, Artificial Sequence
  targeting sequence with CTCN PAM
auaaaaaaauuuaaaagauu

SEQ ID NO: 10217 - RNA, 20 nt, Artificial Sequence
  targeting sequence with CTCN PAM
cuaaucuuuuaaauuuuuuu

SEQ ID NO: 10218 - RNA, 20 nt, Artificial Sequence
  targeting sequence with CTCN PAM
ggaggcugauaugggaggcu

SEQ ID NO: 10219 - RNA, 20 nt, Artificial Sequence
  targeting sequence with CTCN PAM
ugaguagccgggaccacagg

SEQ ID NO: 10220 - RNA, 20 nt, Artificial Sequence
  targeting sequence with CTCN PAM
cauaucagccuccugaguag

SEQ ID NO: 10221 - RNA, 20 nt, Artificial Sequence
  targeting sequence with CTCN PAM
agcaagccucccauaucagc

SEQ ID NO: 10222 - RNA, 20 nt, Artificial Sequence
  targeting sequence with CTCN PAM
cagcucaagcaagccuccca

SEQ ID NO: 10223 - RNA, 20 nt, Artificial Sequence
  targeting sequence with CTCN PAM
gccucccagcucaagcaagc

SEQ ID NO: 10224 - RNA, 20 nt, Artificial Sequence
  targeting sequence with CTCN PAM
cugcacccucagccucccag

SEQ ID NO: 10225 - RNA, 20 nt, Artificial Sequence
  targeting sequence with CTCN PAM
guaacccaggcugcagugca

SEQ ID NO: 10226 - RNA, 20 nt, Artificial Sequence
  targeting sequence with CTCN PAM
aggcccuccacucuaaggcu

SEQ ID NO: 10227 - RNA, 20 nt, Artificial Sequence
  targeting sequence with CTCN PAM
acucuaaggcuggugaauau

SEQ ID NO: 10228 - RNA, 20 nt, Artificial Sequence
  targeting sequence with CTCN PAM
aaggcuggugaauauagcug

SEQ ID NO: 10229 - RNA, 20 nt, Artificial Sequence
  targeting sequence with CTCN PAM
cucucucuagacagcccaug

SEQ ID NO: 10230 - RNA, 20 nt, Artificial Sequence
  targeting sequence with CTCN PAM
cucucuagacagcccauguc

SEQ ID NO: 10231 - RNA, 20 nt, Artificial Sequence
  targeting sequence with CTCN PAM
cucuagacagcccaugucau

SEQ ID NO: 10232 - RNA, 20 nt, Artificial Sequence
  targeting sequence with CTCN PAM
cuagacagcccaugucauaa

SEQ ID NO: 10233 - RNA, 20 nt, Artificial Sequence
  targeting sequence with CTCN PAM
agacagcccaugucauaagg

SEQ ID NO: 10234 - RNA, 20 nt, Artificial Sequence
  targeting sequence with CTCN PAM
ggcaaaauuccucccagauu

SEQ ID NO: 10235 - RNA, 20 nt, Artificial Sequence
  targeting sequence with CTCN PAM
cagauuacauuuucugacaa

SEQ ID NO: 10236 - RNA, 20 nt, Artificial Sequence
  targeting sequence with CTCN PAM
ugaaugcuuuccauauauga

SEQ ID NO: 10237 - RNA, 20 nt, Artificial Sequence
  targeting sequence with CTCN PAM
gcccguuggaaccuaggccu

SEQ ID NO: 10238 - RNA, 20 nt, Artificial Sequence
  targeting sequence with CTCN PAM
cucuccuuccccuccacaga

SEQ ID NO: 10239 - RNA, 20 nt, Artificial Sequence
  targeting sequence with CTCN PAM
cuccuuccccuccacagaau

SEQ ID NO: 10240 - RNA, 20 nt, Artificial Sequence
  targeting sequence with CTCN PAM
ccuuccccuccacagaauca

SEQ ID NO: 10241 - RNA, 20 nt, Artificial Sequence
  targeting sequence with CTCN PAM
uuccccuccacagaaucaag

SEQ ID NO: 10242 - RNA, 20 nt, Artificial Sequence
  targeting sequence with CTCN PAM
acagaaucaaguaucagcug

SEQ ID NO: 10243 - RNA, 20 nt, Artificial Sequence
  targeting sequence with CTCN PAM
aaccagcugauacuugauuc

SEQ ID NO: 10244 - RNA, 20 nt, Artificial Sequence
  targeting sequence with CTCN PAM
gugauguuggaacaacuugg

SEQ ID NO: 10245 - RNA, 20 nt, Artificial Sequence
  targeting sequence with CTCN PAM
gcaagaaccaaguuguucca

SEQ ID NO: 10246 - RNA, 20 nt, Artificial Sequence
  targeting sequence with CTCN PAM
ccgaucccuggugaccaccu

SEQ ID NO: 10247 - RNA, 20 nt, Artificial Sequence
  targeting sequence with CTCN PAM
cauggguccccuucccuauu

SEQ ID NO: 10248 - RNA, 20 nt, Artificial Sequence
  targeting sequence with CTCN PAM
uuccuaguggccagcguugc

SEQ ID NO: 10249 - RNA, 20 nt, Artificial Sequence
  targeting sequence with CTCN PAM
gucucauuccuaguggccag

SEQ ID NO: 10250 - RNA, 20 nt, Artificial Sequence
  targeting sequence with CTCN PAM
caagugguccccagcauaga

SEQ ID NO: 10251 - RNA, 20 nt, Artificial Sequence
  targeting sequence with CTCN PAM
cccaagugguccccagcaua

SEQ ID NO: 10252 - RNA, 20 nt, Artificial Sequence
  targeting sequence with CTCN PAM
accaaagcuuuuggcucucc

SEQ ID NO: 10253 - RNA, 20 nt, Artificial Sequence
  targeting sequence with CTCN PAM
auucaucuccaccaaagcuu

SEQ ID NO: 10254 - RNA, 20 nt, Artificial Sequence
  targeting sequence with CTCN PAM
ucuaagcuuugcagaugaau

SEQ ID NO: 10255 - RNA, 20 nt, Artificial Sequence
  targeting sequence with CTCN PAM
aagcuuugcagaugaauccu

SEQ ID NO: 10256 - RNA, 20 nt, Artificial Sequence
  targeting sequence with CTCN PAM
agagaaaagaacagcaacag

SEQ ID NO: 10257 - RNA, 20 nt, Artificial Sequence
  targeting sequence with CTCN PAM
ggaggggcugaccauuucag

SEQ ID NO: 10258 - RNA, 20 nt, Artificial Sequence
  targeting sequence with CTCN PAM
gaggacccacaguccccuuu

SEQ ID NO: 10259 - RNA, 20 nt, Artificial Sequence
  targeting sequence with CTCN PAM
gagccuguugcuguucuuuu

SEQ ID NO: 10260 - RNA, 20 nt, Artificial Sequence
  targeting sequence with CTCN PAM
uaguacuuuacacuaauaaa

SEQ ID NO: 10261 - RNA, 20 nt, Artificial Sequence
  targeting sequence with CTCN PAM
uguucccccgcccacuacgg

SEQ ID NO: 10262 - RNA, 20 nt, Artificial Sequence
  targeting sequence with CTCN PAM
aacucuguuuuugaaaaauu

SEQ ID NO: 10263 - RNA, 20 nt, Artificial Sequence
  targeting sequence with CTCN PAM
guuuuugaaaaauuuauuuu

SEQ ID NO: 10264 - RNA, 20 nt, Artificial Sequence
  targeting sequence with CTCN PAM
uagaagcuaagaacuuugcc

SEQ ID NO: 10265 - RNA, 20 nt, Artificial Sequence
  targeting sequence with CTCN PAM
uguguauaaaaucuuguuua

SEQ ID NO: 10266 - RNA, 20 nt, Artificial Sequence
  targeting sequence with CTCN PAM
gcuaccucuuguguauaaaa

SEQ ID NO: 10267 - RNA, 20 nt, Artificial Sequence
  targeting sequence with CTCN PAM
gaagguaacugcacacaccu

SEQ ID NO: 10268 - RNA, 20 nt, Artificial Sequence
  targeting sequence with CTCN PAM
auguuagcagggaagguggg

SEQ ID NO: 10269 - RNA, 20 nt, Artificial Sequence
  targeting sequence with CTCN PAM
aguuccuaaaacugacugua

SEQ ID NO: 10270 - RNA, 20 nt, Artificial Sequence
  targeting sequence with CTCN PAM
cacggucacugacaacuaca

SEQ ID NO: 10271 - RNA, 20 nt, Artificial Sequence
  targeting sequence with CTCN PAM
aggagaagucguggugagau

SEQ ID NO: 10272 - RNA, 20 nt, Artificial Sequence
  targeting sequence with CTCN PAM
uggaguccucacacggucac

SEQ ID NO: 10273 - RNA, 20 nt, Artificial Sequence
  targeting sequence with CTCN PAM
ccacgacuucuccuggaguc

SEQ ID NO: 10274 - RNA, 20 nt, Artificial Sequence
  targeting sequence with CTCN PAM
cuaagggagcuucuugagaa

SEQ ID NO: 10275 - RNA, 20 nt, Artificial Sequence
  targeting sequence with CTCN PAM
cuuagugaggccgaucuuaa

SEQ ID NO: 10276 - RNA, 20 nt, Artificial Sequence
  targeting sequence with CTCN PAM
agaagcucccuuagugaggc

SEQ ID NO: 10277 - RNA, 20 nt, Artificial Sequence
  targeting sequence with CTCN PAM
auaaugcuguguguucucaa

SEQ ID NO: 10278 - RNA, 20 nt, Artificial Sequence
  targeting sequence with CTCN PAM
guuugcagaccauuuugaaa

SEQ ID NO: 10279 - RNA, 20 nt, Artificial Sequence
  targeting sequence with CTCN PAM
uccaagguaagccugucaua

SEQ ID NO: 10280 - RNA, 20 nt, Artificial Sequence
  targeting sequence with CTCN PAM
cuguaaagcuucaucaggau

SEQ ID NO: 10281 - RNA, 20 nt, Artificial Sequence
  targeting sequence with CTCN PAM
ugauuuugggcuccugagag

SEQ ID NO: 10282 - RNA, 20 nt, Artificial Sequence
  targeting sequence with CTCN PAM
ugagagugcagucgccagcg

SEQ ID NO: 10283 - RNA, 20 nt, Artificial Sequence
  targeting sequence with CTCN PAM
ggagcccaaaaucaggagug

SEQ ID NO: 10284 - RNA, 20 nt, Artificial Sequence
  targeting sequence with CTCN PAM
caggagcccaaaaucaggag

SEQ ID NO: 10285 - RNA, 20 nt, Artificial Sequence
  targeting sequence with CTCN PAM
uggugaggaugugggcggag

SEQ ID NO: 10286 - RNA, 20 nt, Artificial Sequence
  targeting sequence with CTCN PAM
ccaagagauugugugggaca

SEQ ID NO: 10287 - RNA, 20 nt, Artificial Sequence
  targeting sequence with CTCN PAM
gcccacauccucaccaagag

SEQ ID NO: 10288 - RNA, 20 nt, Artificial Sequence
  targeting sequence with CTCN PAM
ccgcccacauccucaccaag

SEQ ID NO: 10289 - RNA, 20 nt, Artificial Sequence
  targeting sequence with CTCN PAM
ccuucucuccgcccacaucc

SEQ ID NO: 10290 - RNA, 20 nt, Artificial Sequence
  targeting sequence with CTCN PAM
aaaccaaugguagaacauca

SEQ ID NO: 10291 - RNA, 20 nt, Artificial Sequence
  targeting sequence with CTCN PAM
ccucuguccguuucucuaag

SEQ ID NO: 10292 - RNA, 20 nt, Artificial Sequence
  targeting sequence with CTCN PAM
guccguuucucuaaggguac

SEQ ID NO: 10293 - RNA, 20 nt, Artificial Sequence
  targeting sequence with CTCN PAM
aaggguacaguucugcucuu

SEQ ID NO: 10294 - RNA, 20 nt, Artificial Sequence
  targeting sequence with CTCN PAM
uaagugcuggcccuuccauc

SEQ ID NO: 10295 - RNA, 20 nt, Artificial Sequence
  targeting sequence with CTCN PAM
guguguuugacaaaggccac

SEQ ID NO: 10296 - RNA, 20 nt, Artificial Sequence
  targeting sequence with CTCN PAM
agcaagucacagaauaacaa

SEQ ID NO: 10297 - RNA, 20 nt, Artificial Sequence
  targeting sequence with CTCN PAM
cugccagagaaugaaaagac

SEQ ID NO: 10298 - RNA, 20 nt, Artificial Sequence
  targeting sequence with CTCN PAM
ggcagugaggguuucugugc

SEQ ID NO: 10299 - RNA, 20 nt, Artificial Sequence
  targeting sequence with CTCN PAM
ccauggcccagucuuuucau

SEQ ID NO: 10300 - RNA, 20 nt, Artificial Sequence
  targeting sequence with CTCN PAM
cgccauggcccagucuuuuc

SEQ ID NO: 10301 - RNA, 20 nt, Artificial Sequence
  targeting sequence with CTCN PAM
uuacugugcucucgccaugg

SEQ ID NO: 10302 - RNA, 20 nt, Artificial Sequence
  targeting sequence with CTCN PAM
gugacuuggcaaaucugaca

SEQ ID NO: 10303 - RNA, 20 nt, Artificial Sequence
  targeting sequence with CTCN PAM
cuaguucugugcauggugag

SEQ ID NO: 10304 - RNA, 20 nt, Artificial Sequence
  targeting sequence with CTCN PAM
ccaugcacagaacuagggag

SEQ ID NO: 10305 - RNA, 20 nt, Artificial Sequence
  targeting sequence with CTCN PAM
cauuuucggcccuguuuugc

SEQ ID NO: 10306 - RNA, 20 nt, Artificial Sequence
  targeting sequence with CTCN PAM
cccccacaccauaaaaggga

SEQ ID NO: 10307 - RNA, 20 nt, Artificial Sequence
  targeting sequence with CTCN PAM
cccacaccauaaaagggagc

SEQ ID NO: 10308 - RNA, 20 nt, Artificial Sequence
  targeting sequence with CTCN PAM
cuuuuauggugugggggaga

SEQ ID NO: 10309 - RNA, 20 nt, Artificial Sequence
  targeting sequence with CTCN PAM
uuuauaccagcucccuuuua

SEQ ID NO: 10310 - RNA, 20 nt, Artificial Sequence
  targeting sequence with CTCN PAM
acaugacuaauuaacacuga

SEQ ID NO: 10311 - RNA, 20 nt, Artificial Sequence
  targeting sequence with CTCN PAM
ucaacaugacuaauuaacac

SEQ ID NO: 10312 - RNA, 20 nt, Artificial Sequence
  targeting sequence with CTCN PAM
aauuccuucucugcauuaca

SEQ ID NO: 10313 - RNA, 20 nt, Artificial Sequence
  targeting sequence with CTCN PAM
gcauuacaauaacuaugaaa

SEQ ID NO: 10314 - RNA, 20 nt, Artificial Sequence
  targeting sequence with CTCN PAM
caagcaguguguaccaacuc

SEQ ID NO: 10315 - RNA, 20 nt, Artificial Sequence
  targeting sequence with CTCN PAM
aauaguuaacuucauauaca

SEQ ID NO: 10316 - RNA, 20 nt, Artificial Sequence
  targeting sequence with CTCN PAM
aagcauuaaaaagauaauuc

SEQ ID NO: 10317 - RNA, 20 nt, Artificial Sequence
  targeting sequence with CTCN PAM
guaaaauuauaucuuaaagu

SEQ ID NO: 10318 - RNA, 20 nt, Artificial Sequence
  targeting sequence with CTCN PAM
uaacuucuuuaaguaauuga

SEQ ID NO: 10319 - RNA, 20 nt, Artificial Sequence
  targeting sequence with CTCN PAM
agaaguacagggugcauuau

SEQ ID NO: 10320 - RNA, 20 nt, Artificial Sequence
  targeting sequence with CTCN PAM
uuucaaucuaauuauaucag

SEQ ID NO: 10321 - RNA, 20 nt, Artificial Sequence
  targeting sequence with CTCN PAM
ugaagauauuuuucugauau

SEQ ID NO: 10322 - RNA, 20 nt, Artificial Sequence
  targeting sequence with CTCN PAM
ucuagacccaucugaaauuc

SEQ ID NO: 10323 - RNA, 20 nt, Artificial Sequence
  targeting sequence with CTCN PAM
cuauuuguauagaauuucag

SEQ ID NO: 10324 - RNA, 20 nt, Artificial Sequence
  targeting sequence with CTCN PAM
acgaugcuacaaaagaaauu

SEQ ID NO: 10325 - RNA, 20 nt, Artificial Sequence
  targeting sequence with CTCN PAM
cucuuguauguucguguaac

SEQ ID NO: 10326 - RNA, 20 nt, Artificial Sequence
  targeting sequence with CTCN PAM
uguauguucguguaacaaaa

SEQ ID NO: 10327 - RNA, 20 nt, Artificial Sequence
  targeting sequence with CTCN PAM
auuuccgaaaaucuccacag

SEQ ID NO: 10328 - RNA, 20 nt, Artificial Sequence
  targeting sequence with CTCN PAM
acagaaaugugaauccacau

SEQ ID NO: 10329 - RNA, 20 nt, Artificial Sequence
  targeting sequence with CTCN PAM
cgggacagcugauccacaug

SEQ ID NO: 10330 - RNA, 20 nt, Artificial Sequence
  targeting sequence with CTCN PAM
ggcauguggaucagcugucc

SEQ ID NO: 10331 - RNA, 20 nt, Artificial Sequence
  targeting sequence with CTCN PAM
cacugccaaacagcucccaa

SEQ ID NO: 10332 - RNA, 20 nt, Artificial Sequence
  targeting sequence with CTCN PAM
caaaccuucuaguggcuuaa

SEQ ID NO: 10333 - RNA, 20 nt, Artificial Sequence
  targeting sequence with CTCN PAM
aggaaagcauuuuuaagcca

SEQ ID NO: 10334 - RNA, 20 nt, Artificial Sequence
  targeting sequence with CTCN PAM
aggcucuuccaaaggguucg

SEQ ID NO: 10335 - RNA, 20 nt, Artificial Sequence
  targeting sequence with CTCN PAM
uccaaaggguucgagauucu

SEQ ID NO: 10336 - RNA, 20 nt, Artificial Sequence
  targeting sequence with CTCN PAM
aacccuuuggaagagccugg

SEQ ID NO: 10337 - RNA, 20 nt, Artificial Sequence
  targeting sequence with CTCN PAM
gcaccuucuuggaaucagaa

SEQ ID NO: 10338 - RNA, 20 nt, Artificial Sequence
  targeting sequence with CTCN PAM
ucucaggcugggcauguucc

SEQ ID NO: 10339 - RNA, 20 nt, Artificial Sequence
  targeting sequence with CTCN PAM
caggcugggcauguuccucu

SEQ ID NO: 10340 - RNA, 20 nt, Artificial Sequence
  targeting sequence with CTCN PAM
ggcugggcauguuccucuag

SEQ ID NO: 10341 - RNA, 20 nt, Artificial Sequence
  targeting sequence with CTCN PAM
agggaucaacaucaucaagg

SEQ ID NO: 10342 - RNA, 20 nt, Artificial Sequence
  targeting sequence with CTCN PAM
acucaccaaucaucauggga

SEQ ID NO: 10343 - RNA, 20 nt, Artificial Sequence
  targeting sequence with CTCN PAM
ccaaucaucaugggagauuc

SEQ ID NO: 10344 - RNA, 20 nt, Artificial Sequence
  targeting sequence with CTCN PAM
caugaugauuggugaguuga

SEQ ID NO: 10345 - RNA, 20 nt, Artificial Sequence
  targeting sequence with CTCN PAM
aaccguaugaacuuuaacuu

SEQ ID NO: 10346 - RNA, 20 nt, Artificial Sequence
  targeting sequence with CTCN PAM
uuuagucagugaaacaaccc

SEQ ID NO: 10347 - RNA, 20 nt, Artificial Sequence
  targeting sequence with CTCN PAM
gcacccaugugagaacgcag

SEQ ID NO: 10348 - RNA, 20 nt, Artificial Sequence
  targeting sequence with CTCN PAM
caugggugcagaguagcauu

SEQ ID NO: 10349 - RNA, 20 nt, Artificial Sequence
  targeting sequence with CTCN PAM
gcguucucacaugggugcag

SEQ ID NO: 10350 - RNA, 20 nt, Artificial Sequence
  targeting sequence with CTCN PAM
cagcuuuaucacugcucugc

SEQ ID NO: 10351 - RNA, 20 nt, Artificial Sequence
  targeting sequence with CTCN PAM
cccagcuuuaucacugcucu

SEQ ID NO: 10352 - RNA, 20 nt, Artificial Sequence
  targeting sequence with CTCN PAM
cacagugcccaacgugaagc

SEQ ID NO: 10353 - RNA, 20 nt, Artificial Sequence
  targeting sequence with CTCN PAM
cugcccugcaccugccaaau

SEQ ID NO: 10354 - RNA, 20 nt, Artificial Sequence
  targeting sequence with CTCN PAM
gggucacuccugggucugaa

SEQ ID NO: 10355 - RNA, 20 nt, Artificial Sequence
  targeting sequence with CTCN PAM
ugggucugaaggcuaccucu

SEQ ID NO: 10356 - RNA, 20 nt, Artificial Sequence
  targeting sequence with CTCN PAM
guuaccaucuguguggccuu

SEQ ID NO: 10357 - RNA, 20 nt, Artificial Sequence
  targeting sequence with CTCN PAM
ccgugugccauggggcugau

SEQ ID NO: 10358 - RNA, 20 nt, Artificial Sequence
  targeting sequence with CTCN PAM
aacuagaucagccccauggc

SEQ ID NO: 10359 - RNA, 20 nt, Artificial Sequence
  targeting sequence with CTCN PAM
ccaccccagcuccaacuaga

SEQ ID NO: 10360 - RNA, 20 nt, Artificial Sequence
  targeting sequence with CTCN PAM
uccccaccccagcuccaacu

SEQ ID NO: 10361 - RNA, 20 nt, Artificial Sequence
  targeting sequence with CTCN PAM
cuaaagugacaaccuaagcu

SEQ ID NO: 10362 - RNA, 20 nt, Artificial Sequence
  targeting sequence with CTCN PAM
aaagugacaaccuaagcuga

SEQ ID NO: 10363 - RNA, 20 nt, Artificial Sequence
  targeting sequence with CTCN PAM
gcuuagguugucacuuuaga

SEQ ID NO: 10364 - RNA, 20 nt, Artificial Sequence
  targeting sequence with CTCN PAM
cucagcuuagguugucacuu

SEQ ID NO: 10365 - RNA, 20 nt, Artificial Sequence
  targeting sequence with CTCN PAM
cacucagcuuagguugucac

SEQ ID NO: 10366 - RNA, 20 nt, Artificial Sequence
  targeting sequence with CTCN PAM
cccccaacucucacucagcu

SEQ ID NO: 10367 - RNA, 20 nt, Artificial Sequence
  targeting sequence with CTCN PAM
gggccccccuacucaccccc

SEQ ID NO: 10368 - RNA, 20 nt, Artificial Sequence
  targeting sequence with CTCN PAM
uccuuccaccucagggcccc

SEQ ID NO: 10369 - RNA, 20 nt, Artificial Sequence
  targeting sequence with CTCN PAM
cuuccuuccaccucagggcc

SEQ ID NO: 10370 - RNA, 20 nt, Artificial Sequence
  targeting sequence with CTCN PAM
caaguagcugggauuacagg

SEQ ID NO: 10371 - RNA, 20 nt, Artificial Sequence
  targeting sequence with CTCN PAM
gccucccaaguagcugggau

SEQ ID NO: 10372 - RNA, 20 nt, Artificial Sequence
  targeting sequence with CTCN PAM
uugccucagccucccaagua

SEQ ID NO: 10373 - RNA, 20 nt, Artificial Sequence
  targeting sequence with CTCN PAM
cagguuccagcgauucuccu

SEQ ID NO: 10374 - RNA, 20 nt, Artificial Sequence
  targeting sequence with CTCN PAM
uucucccagguuccagcgau

SEQ ID NO: 10375 - RNA, 20 nt, Artificial Sequence
  targeting sequence with CTCN PAM
cugcuaccuccuucucccag

SEQ ID NO: 10376 - RNA, 20 nt, Artificial Sequence
  targeting sequence with CTCN PAM
ccucacugcuaccuccuucu

SEQ ID NO: 10377 - RNA, 20 nt, Artificial Sequence
  targeting sequence with CTCN PAM
agccugggugacagagcaac

SEQ ID NO: 10378 - RNA, 20 nt, Artificial Sequence
  targeting sequence with CTCN PAM
gucacccaggcuggagugca

SEQ ID NO: 10379 - RNA, 20 nt, Artificial Sequence
  targeting sequence with CTCN PAM
aucucaaaaaaaaaaaaaaa

SEQ ID NO: 10380 - RNA, 20 nt, Artificial Sequence
  targeting sequence with CTCN PAM
aaaaaaaaaaaaaaaaaaaa

SEQ ID NO: 10381 - RNA, 20 nt, Artificial Sequence
  targeting sequence with CTCN PAM
ccacccccauuuucugauuu

SEQ ID NO: 10382 - RNA, 20 nt, Artificial Sequence
  targeting sequence with CTCN PAM
acacaguccugcuugaucua

SEQ ID NO: 10383 - RNA, 20 nt, Artificial Sequence
  targeting sequence with CTCN PAM
ucauacaaagccuuugaaag

SEQ ID NO: 10384 - RNA, 20 nt, Artificial Sequence
  targeting sequence with CTCN PAM
uacaaagccuuugaaagguu

SEQ ID NO: 10385 - RNA, 20 nt, Artificial Sequence
  targeting sequence with CTCN PAM
gguucaugcacuaaaaccuu

SEQ ID NO: 10386 - RNA, 20 nt, Artificial Sequence
  targeting sequence with CTCN PAM
cugguucaugcacuaaaacc

SEQ ID NO: 10387 - RNA, 20 nt, Artificial Sequence
  targeting sequence with CTCN PAM
accccugcuucucucugguu

SEQ ID NO: 10388 - RNA, 20 nt, Artificial Sequence
  targeting sequence with CTCN PAM
ccuccaccccugcuucucuc

SEQ ID NO: 10389 - RNA, 20 nt, Artificial Sequence
  targeting sequence with CTCN PAM
gccuacaucuguaaggaucc

SEQ ID NO: 10390 - RNA, 20 nt, Artificial Sequence
  targeting sequence with CTCN PAM
cugccuacaucuguaaggau

SEQ ID NO: 10391 - RNA, 20 nt, Artificial Sequence
  targeting sequence with CTCN PAM
accugucaucagccccucuc

SEQ ID NO: 10392 - RNA, 20 nt, Artificial Sequence
  targeting sequence with CTCN PAM
uccaccugucaucagccccu

SEQ ID NO: 10393 - RNA, 20 nt, Artificial Sequence
  targeting sequence with CTCN PAM
ccuccaccugucaucagccc

SEQ ID NO: 10394 - RNA, 20 nt, Artificial Sequence
  targeting sequence with CTCN PAM
ucccucuccuccaccuguca

SEQ ID NO: 10395 - RNA, 20 nt, Artificial Sequence
  targeting sequence with CTCN PAM
cuuugaaagggugcucgucc

SEQ ID NO: 10396 - RNA, 20 nt, Artificial Sequence
  targeting sequence with CTCN PAM
cacacagcacccccauguca

SEQ ID NO: 10397 - RNA, 20 nt, Artificial Sequence
  targeting sequence with CTCN PAM
gucaguguuccuuaucucac

SEQ ID NO: 10398 - RNA, 20 nt, Artificial Sequence
  targeting sequence with CTCN PAM
cugcgcccaccaaagcuggc

SEQ ID NO: 10399 - RNA, 20 nt, Artificial Sequence
  targeting sequence with CTCN PAM
ucccugcgcccaccaaagcu

SEQ ID NO: 10400 - RNA, 20 nt, Artificial Sequence
  targeting sequence with CTCN PAM
augugcccagccccuccucc

SEQ ID NO: 10401 - RNA, 20 nt, Artificial Sequence
  targeting sequence with CTCN PAM
gacucgaugugcccagcccc

SEQ ID NO: 10402 - RNA, 20 nt, Artificial Sequence
  targeting sequence with CTCN PAM
acuuggcauaccuuaaagac

SEQ ID NO: 10403 - RNA, 20 nt, Artificial Sequence
  targeting sequence with CTCN PAM
uguucuugacguucuccacu

SEQ ID NO: 10404 - RNA, 20 nt, Artificial Sequence
  targeting sequence with CTCN PAM
cuuguucuugacguucucca

SEQ ID NO: 10405 - RNA, 20 nt, Artificial Sequence
  targeting sequence with CTCN PAM
gcacccaccuuggauuucug

SEQ ID NO: 10406 - RNA, 20 nt, Artificial Sequence
  targeting sequence with CTCN PAM
ccgcacccaccuuggauuuc

SEQ ID NO: 10407 - RNA, 20 nt, Artificial Sequence
  targeting sequence with CTCN PAM
auauucucuccgcacccacc

SEQ ID NO: 10408 - RNA, 20 nt, Artificial Sequence
  targeting sequence with CTCN PAM
cuccauauucucuccgcacc

SEQ ID NO: 10409 - RNA, 20 nt, Artificial Sequence
  targeting sequence with CTCN PAM
ugcccucacuccauauucuc

SEQ ID NO: 10410 - RNA, 20 nt, Artificial Sequence
  targeting sequence with CTCN PAM
aaccuguauccuccugcccu

SEQ ID NO: 10411 - RNA, 20 nt, Artificial Sequence
  targeting sequence with CTCN PAM
acaaaccuuuacuggugguc

SEQ ID NO: 10412 - RNA, 20 nt, Artificial Sequence
  targeting sequence with CTCN PAM
ucuggaccaccaguaaaggu

SEQ ID NO: 10413 - RNA, 20 nt, Artificial Sequence
  targeting sequence with CTCN PAM
uuccuaguacugccucuucu

SEQ ID NO: 10414 - RNA, 20 nt, Artificial Sequence
  targeting sequence with CTCN PAM
gucuccuuccuaguacugcc

SEQ ID NO: 10415 - RNA, 20 nt, Artificial Sequence
  targeting sequence with CTCN PAM
aacccuucuggcuguuccuu

SEQ ID NO: 10416 - RNA, 20 nt, Artificial Sequence
  targeting sequence with CTCN PAM
uaguuuuccucaaacccuuc

SEQ ID NO: 10417 - RNA, 20 nt, Artificial Sequence
  targeting sequence with CTCN PAM
cguaguuuuccucaaacccu

SEQ ID NO: 10418 - RNA, 20 nt, Artificial Sequence
  targeting sequence with CTCN PAM
cucguaguuuuccucaaacc

SEQ ID NO: 10419 - RNA, 20 nt, Artificial Sequence
  targeting sequence with CTCN PAM
ucccguuugaaacacuauuc

SEQ ID NO: 10420 - RNA, 20 nt, Artificial Sequence
  targeting sequence with CTCN PAM
uggcgcucuucccguuugaa

SEQ ID NO: 10421 - RNA, 20 nt, Artificial Sequence
  targeting sequence with CTCN PAM
gcagcaucuagcgcuccugg

SEQ ID NO: 10422 - RNA, 20 nt, Artificial Sequence
  targeting sequence with CTCN PAM
ucuuagccgacugcucggca

SEQ ID NO: 10423 - RNA, 20 nt, Artificial Sequence
  targeting sequence with CTCN PAM
gcaguuggggugacaggugg

SEQ ID NO: 10424 - RNA, 20 nt, Artificial Sequence
  targeting sequence with CTCN PAM
aacucagcaguuggggugac

SEQ ID NO: 10425 - RNA, 20 nt, Artificial Sequence
  targeting sequence with CTCN PAM
ccaacucagcaguuggggug

SEQ ID NO: 10426 - RNA, 20 nt, Artificial Sequence
  targeting sequence with CTCN PAM
ucucuccaacucagcaguug

SEQ ID NO: 10427 - RNA, 20 nt, Artificial Sequence
  targeting sequence with CTCN PAM
cucuucucuccaacucagca

SEQ ID NO: 10428 - RNA, 20 nt, Artificial Sequence
  targeting sequence with CTCN PAM
ucccugcuaacucccucuuc

SEQ ID NO: 10429 - RNA, 20 nt, Artificial Sequence
  targeting sequence with CTCN PAM
ucagccucuucccugcuaac

SEQ ID NO: 10430 - RNA, 20 nt, Artificial Sequence
  targeting sequence with CTCN PAM
cucuucagccucuucccugc

SEQ ID NO: 10431 - RNA, 20 nt, Artificial Sequence
  targeting sequence with CTCN PAM
cucgcucuucagccucuucc

SEQ ID NO: 10432 - RNA, 20 nt, Artificial Sequence
  targeting sequence with CTCN PAM
cacucgcucuucagccucuu

SEQ ID NO: 10433 - RNA, 20 nt, Artificial Sequence
  targeting sequence with CTCN PAM
aaacuuaacuuuccccauuu

SEQ ID NO: 10434 - RNA, 20 nt, Artificial Sequence
  targeting sequence with CTCN PAM
ucuuugcagccaaacuucga

SEQ ID NO: 10435 - RNA, 20 nt, Artificial Sequence
  targeting sequence with CTCN PAM
cuguugccccugccuucuuu

SEQ ID NO: 10436 - RNA, 20 nt, Artificial Sequence
  targeting sequence with CTCN PAM
ucucccuguugccccugccu

SEQ ID NO: 10437 - RNA, 20 nt, Artificial Sequence
  targeting sequence with CTCN PAM
cuucucccuguugccccugc

SEQ ID NO: 10438 - RNA, 20 nt, Artificial Sequence
  targeting sequence with CTCN PAM
ucugcccugucaaagccucu

SEQ ID NO: 10439 - RNA, 20 nt, Artificial Sequence
  targeting sequence with CTCN PAM
cuucugcccugucaaagccu

SEQ ID NO: 10440 - RNA, 20 nt, Artificial Sequence
  targeting sequence with CTCN PAM
ucugcccugucaaagccucu

SEQ ID NO: 10441 - RNA, 20 nt, Artificial Sequence
  targeting sequence with CTCN PAM
gcacacugguuucucuucug

SEQ ID NO: 10442 - RNA, 20 nt, Artificial Sequence
  targeting sequence with CTCN PAM
acccugccagacccuuccca

SEQ ID NO: 10443 - RNA, 20 nt, Artificial Sequence
  targeting sequence with CTCN PAM
ucaauauccagaacgcucca

SEQ ID NO: 10444 - RNA, 20 nt, Artificial Sequence
  targeting sequence with CTCN PAM
gccaaggugggcggggauga

SEQ ID NO: 10445 - RNA, 20 nt, Artificial Sequence
  targeting sequence with CTCN PAM
uccccgcccaccuuggcaga

SEQ ID NO: 10446 - RNA, 20 nt, Artificial Sequence
  targeting sequence with CTCN PAM
guccacccaaagccccuagc

SEQ ID NO: 10447 - RNA, 20 nt, Artificial Sequence
  targeting sequence with CTCN PAM
ugugacagugggaaguuugc

SEQ ID NO: 10448 - RNA, 20 nt, Artificial Sequence
  targeting sequence with CTCN PAM
ccugugacagugggaaguuu

SEQ ID NO: 10449 - RNA, 20 nt, Artificial Sequence
  targeting sequence with CTCN PAM
ucuccugugacagugggaag

SEQ ID NO: 10450 - RNA, 20 nt, Artificial Sequence
  targeting sequence with CTCN PAM
ugcggccacuaauucccaag

SEQ ID NO: 10451 - RNA, 20 nt, Artificial Sequence
  targeting sequence with CTCN PAM
ccugugacagcuuuuauuuu

SEQ ID NO: 10452 - RNA, 20 nt, Artificial Sequence
  targeting sequence with CTCN PAM
ugugacagcuuuuauuuucu

SEQ ID NO: 10453 - RNA, 20 nt, Artificial Sequence
  targeting sequence with CTCN PAM
gcaaaugaaguaggugauga

SEQ ID NO: 10454 - RNA, 20 nt, Artificial Sequence
  targeting sequence with CTCN PAM
ucaccuacuucauuugcaga

SEQ ID NO: 10455 - RNA, 20 nt, Artificial Sequence
  targeting sequence with CTCN PAM
acacauuaccucaucaccua

SEQ ID NO: 10456 - RNA, 20 nt, Artificial Sequence
  targeting sequence with CTCN PAM
cauagugcuuaugaggaucc

SEQ ID NO: 10457 - RNA, 20 nt, Artificial Sequence
  targeting sequence with CTCN PAM
uaagcacuaugugaggcagc

SEQ ID NO: 10458 - RNA, 20 nt, Artificial Sequence
  targeting sequence with CTCN PAM
guggucccuucacaguacuu

SEQ ID NO: 10459 - RNA, 20 nt, Artificial Sequence
  targeting sequence with CTCN PAM
ucuguggucccuucacagua

SEQ ID NO: 10460 - RNA, 20 nt, Artificial Sequence
  targeting sequence with CTCN PAM
ccuggcaagcagguauacuu

SEQ ID NO: 10461 - RNA, 20 nt, Artificial Sequence
  targeting sequence with CTCN PAM
ugaaguauaccugcuugcca

SEQ ID NO: 10462 - RNA, 20 nt, Artificial Sequence
  targeting sequence with CTCN PAM
cgugcucuugaaguauaccu

SEQ ID NO: 10463 - RNA, 20 nt, Artificial Sequence
  targeting sequence with CTCN PAM
ugaaagaaaagcucccgugc

SEQ ID NO: 10464 - RNA, 20 nt, Artificial Sequence
  targeting sequence with CTCN PAM
ccagccuuccuggaaaugug

SEQ ID NO: 10465 - RNA, 20 nt, Artificial Sequence
  targeting sequence with CTCN PAM
caccagccuuccuggaaaug

SEQ ID NO: 10466 - RNA, 20 nt, Artificial Sequence
  targeting sequence with CTCN PAM
uuugcucucaccagccuucc

SEQ ID NO: 10467 - RNA, 20 nt, Artificial Sequence
  targeting sequence with CTCN PAM
aggccuuccauucacuucac

SEQ ID NO: 10468 - RNA, 20 nt, Artificial Sequence
  targeting sequence with CTCN PAM
agguguuuguggcuggccac

SEQ ID NO: 10469 - RNA, 20 nt, Artificial Sequence
  targeting sequence with CTCN PAM
gcccuguaaacacacgguua

SEQ ID NO: 10470 - RNA, 20 nt, Artificial Sequence
  targeting sequence with CTCN PAM
gcauaugcacuaaccgugug

SEQ ID NO: 10471 - RNA, 20 nt, Artificial Sequence
  targeting sequence with CTCN PAM
gcucagcauaugcacuaacc

SEQ ID NO: 10472 - RNA, 20 nt, Artificial Sequence
  targeting sequence with CTCN PAM
agugaucucagcucagcaua

SEQ ID NO: 10473 - RNA, 20 nt, Artificial Sequence
  targeting sequence with CTCN PAM
uuggacucacauuccagagg

SEQ ID NO: 10474 - RNA, 20 nt, Artificial Sequence
  targeting sequence with CTCN PAM
cauuccagaggaagcaucuu

SEQ ID NO: 10475 - RNA, 20 nt, Artificial Sequence
  targeting sequence with CTCN PAM
ggaaugugaguccaaagagu

SEQ ID NO: 10476 - RNA, 20 nt, Artificial Sequence
  targeting sequence with CTCN PAM
gcuguggaaauucuuuuugg

SEQ ID NO: 10477 - RNA, 20 nt, Artificial Sequence
  targeting sequence with CTCN PAM
uaagcuuuccaaaaagaauu

SEQ ID NO: 10478 - RNA, 20 nt, Artificial Sequence
  targeting sequence with CTCN PAM
guucucauuggcaggacuac

SEQ ID NO: 10479 - RNA, 20 nt, Artificial Sequence
  targeting sequence with CTCN PAM
uuggcaggacuacucuccga

SEQ ID NO: 10480 - RNA, 20 nt, Artificial Sequence
  targeting sequence with CTCN PAM
ccgacccauuacugcuuccu

SEQ ID NO: 10481 - RNA, 20 nt, Artificial Sequence
  targeting sequence with CTCN PAM
gacccauuacugcuuccuga

SEQ ID NO: 10482 - RNA, 20 nt, Artificial Sequence
  targeting sequence with CTCN PAM
uuuucauucaacaaagcugu

SEQ ID NO: 10483 - RNA, 20 nt, Artificial Sequence
  targeting sequence with CTCN PAM
ggucccacugaaggucagau

SEQ ID NO: 10484 - RNA, 20 nt, Artificial Sequence
  targeting sequence with CTCN PAM
ggccuccggucccacugaag

SEQ ID NO: 10485 - RNA, 20 nt, Artificial Sequence
  targeting sequence with CTCN PAM
caggccuccggucccacuga

SEQ ID NO: 10486 - RNA, 20 nt, Artificial Sequence
  targeting sequence with CTCN PAM
cucucaggccuccgguccca

SEQ ID NO: 10487 - RNA, 20 nt, Artificial Sequence
  targeting sequence with CTCN PAM
accccugucccuuuuuguga

SEQ ID NO: 10488 - RNA, 20 nt, Artificial Sequence
  targeting sequence with CTCN PAM
ucuucaacucauaccucucu

SEQ ID NO: 10489 - RNA, 20 nt, Artificial Sequence
  targeting sequence with CTCN PAM
uaccucucuucucagagguu

SEQ ID NO: 10490 - RNA, 20 nt, Artificial Sequence
  targeting sequence with CTCN PAM
cuucucagagguugcaguuu

SEQ ID NO: 10491 - RNA, 20 nt, Artificial Sequence
  targeting sequence with CTCN PAM
ucucagagguugcaguuucu

SEQ ID NO: 10492 - RNA, 20 nt, Artificial Sequence
  targeting sequence with CTCN PAM
gagguugcaguuucugagaa

SEQ ID NO: 10493 - RNA, 20 nt, Artificial Sequence
  targeting sequence with CTCN PAM
gagaagagagguaugaguug

SEQ ID NO: 10494 - RNA, 20 nt, Artificial Sequence
  targeting sequence with CTCN PAM
gaaacugcaaccucugagaa

SEQ ID NO: 10495 - RNA, 20 nt, Artificial Sequence
  targeting sequence with CTCN PAM
auaagugauuuagaccacgc

SEQ ID NO: 10496 - RNA, 20 nt, Artificial Sequence
  targeting sequence with CTCN PAM
uguuuuugcguggucuaaau

SEQ ID NO: 10497 - RNA, 20 nt, Artificial Sequence
  targeting sequence with CTCN PAM
caccugagcugaaaugguuc

SEQ ID NO: 10498 - RNA, 20 nt, Artificial Sequence
  targeting sequence with CTCN PAM
ccugagcugaaaugguucgc

SEQ ID NO: 10499 - RNA, 20 nt, Artificial Sequence
  targeting sequence with CTCN PAM
ggugagaguugucucuuguu

SEQ ID NO: 10500 - RNA, 20 nt, Artificial Sequence
  targeting sequence with CTCN PAM
aaugaaacaucaacuggaaa

SEQ ID NO: 10501 - RNA, 20 nt, Artificial Sequence
  targeting sequence with CTCN PAM
gugguguccaguaauguucu

SEQ ID NO: 10502 - RNA, 20 nt, Artificial Sequence
  targeting sequence with CTCN PAM
gaugucagaacauuacugga

SEQ ID NO: 10503 - RNA, 20 nt, Artificial Sequence
  targeting sequence with CTCN PAM
gauggcauuuuugaccuuuc

SEQ ID NO: 10504 - RNA, 20 nt, Artificial Sequence
  targeting sequence with CTCN PAM
auaucuaaugguagaaacug

SEQ ID NO: 10505 - RNA, 20 nt, Artificial Sequence
  targeting sequence with CTCN PAM
gucaaguauugcuucuuaua

SEQ ID NO: 10506 - RNA, 20 nt, Artificial Sequence
  targeting sequence with CTCN PAM
auauucaguucuagagauuu

SEQ ID NO: 10507 - RNA, 20 nt, Artificial Sequence
  targeting sequence with CTCN PAM
agaacugaauauggagacug

SEQ ID NO: 10508 - RNA, 20 nt, Artificial Sequence
  targeting sequence with CTCN PAM
aguggugggaauucuccuug

SEQ ID NO: 10509 - RNA, 20 nt, Artificial Sequence
  targeting sequence with CTCN PAM
uugaaguacuccuuagcugc

SEQ ID NO: 10510 - RNA, 20 nt, Artificial Sequence
  targeting sequence with CTCN PAM
uuagcugcaggacaccugau

SEQ ID NO: 10511 - RNA, 20 nt, Artificial Sequence
  targeting sequence with CTCN PAM
gucaucagguguccugcagc

SEQ ID NO: 10512 - RNA, 20 nt, Artificial Sequence
  targeting sequence with CTCN PAM
ucggucaucagguguccugc

SEQ ID NO: 10513 - RNA, 20 nt, Artificial Sequence
  targeting sequence with CTCN PAM
aggaaccccauuuaaguaga

SEQ ID NO: 10514 - RNA, 20 nt, Artificial Sequence
  targeting sequence with CTCN PAM
augaauuugacuacucuagg

SEQ ID NO: 10515 - RNA, 20 nt, Artificial Sequence
  targeting sequence with CTCN PAM
cuucccccagccccuggggg

SEQ ID NO: 10516 - RNA, 20 nt, Artificial Sequence
  targeting sequence with CTCN PAM
cuauuccucccuucccccag

SEQ ID NO: 10517 - RNA, 20 nt, Artificial Sequence
  targeting sequence with CTCN PAM
ggaccuauugaagacugacu

SEQ ID NO: 10518 - RNA, 20 nt, Artificial Sequence
  targeting sequence with CTCN PAM
uuucaucuucugaaacugaa

SEQ ID NO: 10519 - RNA, 20 nt, Artificial Sequence
  targeting sequence with CTCN PAM
agaacucuuuucaucuucug

SEQ ID NO: 10520 - RNA, 20 nt, Artificial Sequence
  targeting sequence with CTCN PAM
augacucuaggcaugucacu

SEQ ID NO: 10521 - RNA, 20 nt, Artificial Sequence
  targeting sequence with CTCN PAM
aggcaugucacuuaaacuac

SEQ ID NO: 10522 - RNA, 20 nt, Artificial Sequence
  targeting sequence with CTCN PAM
caacuguacuaaccucauga

SEQ ID NO: 10523 - RNA, 20 nt, Artificial Sequence
  targeting sequence with CTCN PAM
ugaaguuguuacaaagauga

SEQ ID NO: 10524 - RNA, 20 nt, Artificial Sequence
  targeting sequence with CTCN PAM
ggagcuacaggugacaugau

SEQ ID NO: 10525 - RNA, 20 nt, Artificial Sequence
  targeting sequence with CTCN PAM
ugagcacuugugaacccagg

SEQ ID NO: 10526 - RNA, 20 nt, Artificial Sequence
  targeting sequence with CTCN PAM
gaauagccuuucaaaucaug

SEQ ID NO: 10527 - RNA, 20 nt, Artificial Sequence
  targeting sequence with CTCN PAM
aggucccuaaccucagaaua

SEQ ID NO: 10528 - RNA, 20 nt, Artificial Sequence
  targeting sequence with CTCN PAM
ucaggcucuaggucccuaac

SEQ ID NO: 10529 - RNA, 20 nt, Artificial Sequence
  targeting sequence with CTCN PAM
uuaauguaacccagcuacca

SEQ ID NO: 10530 - RNA, 20 nt, Artificial Sequence
  targeting sequence with CTCN PAM
agguuucucauuaauguaac

SEQ ID NO: 10531 - RNA, 20 nt, Artificial Sequence
  targeting sequence with CTCN PAM
ugaacucuugcucuuaaagc

SEQ ID NO: 10532 - RNA, 20 nt, Artificial Sequence
  targeting sequence with CTCN PAM
ugcucuuaaagccuccauau

SEQ ID NO: 10533 - RNA, 20 nt, Artificial Sequence
  targeting sequence with CTCN PAM
uaaagccuccauaucugccc

SEQ ID NO: 10534 - RNA, 20 nt, Artificial Sequence
  targeting sequence with CTCN PAM
auaucugcccugauuccugc

SEQ ID NO: 10535 - RNA, 20 nt, Artificial Sequence
  targeting sequence with CTCN PAM
cccaucaggccuuaugucag

SEQ ID NO: 10536 - RNA, 20 nt, Artificial Sequence
  targeting sequence with CTCN PAM
uuuaauacuuccccucauau

SEQ ID NO: 10537 - RNA, 20 nt, Artificial Sequence
  targeting sequence with CTCN PAM
uauuuuuuugagaucaugca

SEQ ID NO: 10538 - RNA, 20 nt, Artificial Sequence
  targeting sequence with CTCN PAM
aaaaaauaugaggggaagua

SEQ ID NO: 10539 - RNA, 20 nt, Artificial Sequence
  targeting sequence with CTCN PAM
gucagggccugcuugcuugg

SEQ ID NO: 10540 - RNA, 20 nt, Artificial Sequence
  targeting sequence with CTCN PAM
agguaucaaaaccgggcaca

SEQ ID NO: 10541 - RNA, 20 nt, Artificial Sequence
  targeting sequence with CTCN PAM
uaugugacuuguaauuaaaa

SEQ ID NO: 10542 - RNA, 20 nt, Artificial Sequence
  targeting sequence with CTCN PAM
cugcauuuuaauucaauacu

SEQ ID NO: 10543 - RNA, 20 nt, Artificial Sequence
  targeting sequence with CTCN PAM
aaaguaaguauugaauuaaa

SEQ ID NO: 10544 - RNA, 20 nt, Artificial Sequence
  targeting sequence with CTCN PAM
ugcucaaaaguaaguauuga

SEQ ID NO: 10545 - RNA, 20 nt, Artificial Sequence
  targeting sequence with CTCN PAM
gcuuugaugcaccacaguaa

SEQ ID NO: 10546 - RNA, 20 nt, Artificial Sequence
  targeting sequence with CTCN PAM
ucccucagcuuugaugcacc

SEQ ID NO: 10547 - RNA, 20 nt, Artificial Sequence
  targeting sequence with CTCN PAM
acugaaaauggcuccaagug

SEQ ID NO: 10548 - RNA, 20 nt, Artificial Sequence
  targeting sequence with CTCN PAM
aagugacaacaagcucucuu

SEQ ID NO: 10549 - RNA, 20 nt, Artificial Sequence
  targeting sequence with CTCN PAM
cuuguucuaaaaaucgacaa

SEQ ID NO: 10550 - RNA, 20 nt, Artificial Sequence
  targeting sequence with CTCN PAM
uguucuaaaaaucgacaaac

SEQ ID NO: 10551 - RNA, 20 nt, Artificial Sequence
  targeting sequence with CTCN PAM
acagaaucccuaaauucuaa

SEQ ID NO: 10552 - RNA, 20 nt, Artificial Sequence
  targeting sequence with CTCN PAM
uaaaagucaaacuugcagca

SEQ ID NO: 10553 - RNA, 20 nt, Artificial Sequence
  targeting sequence with CTCN PAM
aggugaauaaucaggcagua

SEQ ID NO: 10554 - RNA, 20 nt, Artificial Sequence
  targeting sequence with CTCN PAM
guaauaugauauguggaaaa

SEQ ID NO: 10555 - RNA, 20 nt, Artificial Sequence
  targeting sequence with CTCN PAM
caguaauaugauauguggaa

SEQ ID NO: 10556 - RNA, 20 nt, Artificial Sequence
  targeting sequence with CTCN PAM
auguuuuagggauuuaaaca

SEQ ID NO: 10557 - RNA, 20 nt, Artificial Sequence
  targeting sequence with CTCN PAM
cgccuguaaucccugcacuu

SEQ ID NO: 10558 - RNA, 20 nt, Artificial Sequence
  targeting sequence with CTCN PAM
caaagugcagggauuacagg

SEQ ID NO: 10559 - RNA, 20 nt, Artificial Sequence
  targeting sequence with CTCN PAM
agugauccacccgccuuugc

SEQ ID NO: 10560 - RNA, 20 nt, Artificial Sequence
  targeting sequence with CTCN PAM
ugaccucaagugauccaccc

SEQ ID NO: 10561 - RNA, 20 nt, Artificial Sequence
  targeting sequence with CTCN PAM
aacuccugaccucaagugau

SEQ ID NO: 10562 - RNA, 20 nt, Artificial Sequence
  targeting sequence with CTCN PAM
ggcuggucucaaacuccuga

SEQ ID NO: 10563 - RNA, 20 nt, Artificial Sequence
  targeting sequence with CTCN PAM
acaaaaaaauacaaaaauua

SEQ ID NO: 10564 - RNA, 20 nt, Artificial Sequence
  targeting sequence with CTCN PAM
caaguaggugggauuauggg

SEQ ID NO: 10565 - RNA, 20 nt, Artificial Sequence
  targeting sequence with CTCN PAM
gccucccaaguaggugggau

SEQ ID NO: 10566 - RNA, 20 nt, Artificial Sequence
  targeting sequence with CTCN PAM
caccucagccucccaaguag

SEQ ID NO: 10567 - RNA, 20 nt, Artificial Sequence
  targeting sequence with CTCN PAM
agugauccucccaccucagc

SEQ ID NO: 10568 - RNA, 20 nt, Artificial Sequence
  targeting sequence with CTCN PAM
gccccacaagcucaagugau

SEQ ID NO: 10569 - RNA, 20 nt, Artificial Sequence
  targeting sequence with CTCN PAM
cugcaaacucugccccacaa

SEQ ID NO: 10570 - RNA, 20 nt, Artificial Sequence
  targeting sequence with CTCN PAM
gcucacugcaaacucugccc

SEQ ID NO: 10571 - RNA, 20 nt, Artificial Sequence
  targeting sequence with CTCN PAM
agacuggaagacaaagugag

SEQ ID NO: 10572 - RNA, 20 nt, Artificial Sequence
  targeting sequence with CTCN PAM
cuuugucuuccagucuagag

SEQ ID NO: 10573 - RNA, 20 nt, Artificial Sequence
  targeting sequence with CTCN PAM
aaaauaaauaaauaaauaaa

SEQ ID NO: 10574 - RNA, 20 nt, Artificial Sequence
  targeting sequence with CTCN PAM
ugaggaguuuauaguuuuua

SEQ ID NO: 10575 - RNA, 20 nt, Artificial Sequence
  targeting sequence with CTCN PAM
agagcaggaccaaguauuau

SEQ ID NO: 10576 - RNA, 20 nt, Artificial Sequence
  targeting sequence with CTCN PAM
ucaagagcaggaccaaguau

SEQ ID NO: 10577 - RNA, 20 nt, Artificial Sequence
  targeting sequence with CTCN PAM
gacuagaguacagcguucca

SEQ ID NO: 10578 - RNA, 20 nt, Artificial Sequence
  targeting sequence with CTCN PAM
agucagagccacacacaggc

SEQ ID NO: 10579 - RNA, 20 nt, Artificial Sequence
  targeting sequence with CTCN PAM
uaauacauagcaaaaucuaa

SEQ ID NO: 10580 - RNA, 20 nt, Artificial Sequence
  targeting sequence with CTCN PAM
ggaaagccaauuuagccuuc

SEQ ID NO: 10581 - RNA, 20 nt, Artificial Sequence
  targeting sequence with CTCN PAM
uaaguuguuugggcagggcu

SEQ ID NO: 10582 - RNA, 20 nt, Artificial Sequence
  targeting sequence with CTCN PAM
ugaaaugugaaugucuuuuu

SEQ ID NO: 10583 - RNA, 20 nt, Artificial Sequence
  targeting sequence with CTCN PAM
gguuuugguuuuucucuccc

SEQ ID NO: 10584 - RNA, 20 nt, Artificial Sequence
  targeting sequence with CTCN PAM
ccccaguggcuacagaguag

SEQ ID NO: 10585 - RNA, 20 nt, Artificial Sequence
  targeting sequence with CTCN PAM
ccaguggcuacagaguagaa

SEQ ID NO: 10586 - RNA, 20 nt, Artificial Sequence
  targeting sequence with CTCN PAM
guagccacuggggagagaaa

SEQ ID NO: 10587 - RNA, 20 nt, Artificial Sequence
  targeting sequence with CTCN PAM
cugaugcaagaaauuuuuca

SEQ ID NO: 10588 - RNA, 20 nt, Artificial Sequence
  targeting sequence with CTCN PAM
cagcaccccugaaucuugcc

SEQ ID NO: 10589 - RNA, 20 nt, Artificial Sequence
  targeting sequence with CTCN PAM
uuuagucaggaagguguagc

SEQ ID NO: 10590 - RNA, 20 nt, Artificial Sequence
  targeting sequence with CTCN PAM
ucuuuuagucaggaaggugu

SEQ ID NO: 10591 - RNA, 20 nt, Artificial Sequence
  targeting sequence with CTCN PAM
cccuacacauuucuccucuu

SEQ ID NO: 10592 - RNA, 20 nt, Artificial Sequence
  targeting sequence with CTCN PAM
uucuggucagaaaaauuaaa

SEQ ID NO: 10593 - RNA, 20 nt, Artificial Sequence
  targeting sequence with CTCN PAM
cucauucuggucagaaaaau

SEQ ID NO: 10594 - RNA, 20 nt, Artificial Sequence
  targeting sequence with CTCN PAM
gugggaucuacagugacuga

SEQ ID NO: 10595 - RNA, 20 nt, Artificial Sequence
  targeting sequence with CTCN PAM
cggugggaucuacagugacu

SEQ ID NO: 10596 - RNA, 20 nt, Artificial Sequence
  targeting sequence with CTCN PAM
ugcuacucucggugggaucu

SEQ ID NO: 10597 - RNA, 20 nt, Artificial Sequence
  targeting sequence with CTCN PAM
aacacaaauuugacucgcuc

SEQ ID NO: 10598 - RNA, 20 nt, Artificial Sequence
  targeting sequence with CTCN PAM
cucuacuuguauaggaucuu

SEQ ID NO: 10599 - RNA, 20 nt, Artificial Sequence
  targeting sequence with CTCN PAM
acuuguauaggaucuucaau

SEQ ID NO: 10600 - RNA, 20 nt, Artificial Sequence
  targeting sequence with CTCN PAM
uggguagaauuauaaagaaa

SEQ ID NO: 10601 - RNA, 20 nt, Artificial Sequence
  targeting sequence with CTCN PAM
ugccuguuaucucagcacuu

SEQ ID NO: 10602 - RNA, 20 nt, Artificial Sequence
  targeting sequence with CTCN PAM
gcacuuugcaaggccaaggc

SEQ ID NO: 10603 - RNA, 20 nt, Artificial Sequence
  targeting sequence with CTCN PAM
ugccuuggccuugcaaagug

SEQ ID NO: 10604 - RNA, 20 nt, Artificial Sequence
  targeting sequence with CTCN PAM
agugauccuccugccuuggc

SEQ ID NO: 10605 - RNA, 20 nt, Artificial Sequence
  targeting sequence with CTCN PAM
uggccucaagugauccuccu

SEQ ID NO: 10606 - RNA, 20 nt, Artificial Sequence
  targeting sequence with CTCN PAM
aaaaaauaaaaaaagaaauu

SEQ ID NO: 10607 - RNA, 20 nt, Artificial Sequence
  targeting sequence with CTCN PAM
uguauagcugggacuacagg

SEQ ID NO: 10608 - RNA, 20 nt, Artificial Sequence
  targeting sequence with CTCN PAM
gccuccuguauagcugggac

SEQ ID NO: 10609 - RNA, 20 nt, Artificial Sequence
  targeting sequence with CTCN PAM
aaguccuaggcacaaaugau

SEQ ID NO: 10610 - RNA, 20 nt, Artificial Sequence
  targeting sequence with CTCN PAM
cuguagccucaaaguccuag

SEQ ID NO: 10611 - RNA, 20 nt, Artificial Sequence
  targeting sequence with CTCN PAM
agccugggcaacagagggag

SEQ ID NO: 10612 - RNA, 20 nt, Artificial Sequence
  targeting sequence with CTCN PAM
guugcccaggcuggagccac

SEQ ID NO: 10613 - RNA, 20 nt, Artificial Sequence
  targeting sequence with CTCN PAM
cucuguugcccaggcuggag

SEQ ID NO: 10614 - RNA, 20 nt, Artificial Sequence
  targeting sequence with CTCN PAM
gucuugaaaaaaagaaaaca

SEQ ID NO: 10615 - RNA, 20 nt, Artificial Sequence
  targeting sequence with CTCN PAM
aauauaucuuaaaacuaaga

SEQ ID NO: 10616 - RNA, 20 nt, Artificial Sequence
  targeting sequence with CTCN PAM
uaguuuuaagauauauuuga

SEQ ID NO: 10617 - RNA, 20 nt, Artificial Sequence
  targeting sequence with CTCN PAM
guggguuaugaggacauaua

SEQ ID NO: 10618 - RNA, 20 nt, Artificial Sequence
  targeting sequence with CTCN PAM
uaacccacagagaacuauag

SEQ ID NO: 10619 - RNA, 20 nt, Artificial Sequence
  targeting sequence with CTCN PAM
uauccuuaggaucauaaagu

SEQ ID NO: 10620 - RNA, 20 nt, Artificial Sequence
  targeting sequence with CTCN PAM
aacuugcuuaguaaaaaugu

SEQ ID NO: 10621 - RNA, 20 nt, Artificial Sequence
  targeting sequence with CTCN PAM
uuagggauaggacuguguau

SEQ ID NO: 10622 - RNA, 20 nt, Artificial Sequence
  targeting sequence with CTCN PAM
aaacucuuuauuaaaugauu

SEQ ID NO: 10623 - RNA, 20 nt, Artificial Sequence
  targeting sequence with CTCN PAM
uuauuaaaugauuauucugu

SEQ ID NO: 10624 - RNA, 20 nt, Artificial Sequence
  targeting sequence with CTCN PAM
auggaguaucaagaauucga

SEQ ID NO: 10625 - RNA, 20 nt, Artificial Sequence
  targeting sequence with CTCN PAM
auagaggccuuggcacagaa

SEQ ID NO: 10626 - RNA, 20 nt, Artificial Sequence
  targeting sequence with CTCN PAM
cucucuaaggaaccucugaa

SEQ ID NO: 10627 - RNA, 20 nt, Artificial Sequence
  targeting sequence with CTCN PAM
cuaaggaaccucugaaccac

SEQ ID NO: 10628 - RNA, 20 nt, Artificial Sequence
  targeting sequence with CTCN PAM
aaggaaccucugaaccacac

SEQ ID NO: 10629 - RNA, 20 nt, Artificial Sequence
  targeting sequence with CTCN PAM
gaaccacacucauuaacuca

SEQ ID NO: 10630 - RNA, 20 nt, Artificial Sequence
  targeting sequence with CTCN PAM
uuaacucauaaccagucacc

SEQ ID NO: 10631 - RNA, 20 nt, Artificial Sequence
  targeting sequence with CTCN PAM
uaaccagucaccaaauucca

SEQ ID NO: 10632 - RNA, 20 nt, Artificial Sequence
  targeting sequence with CTCN PAM
uuccacaauaccucuugauc

SEQ ID NO: 10633 - RNA, 20 nt, Artificial Sequence
  targeting sequence with CTCN PAM
ugaucugucugucccuugcc

SEQ ID NO: 10634 - RNA, 20 nt, Artificial Sequence
  targeting sequence with CTCN PAM
gaauauucccagacuccuaa

SEQ ID NO: 10635 - RNA, 20 nt, Artificial Sequence
  targeting sequence with CTCN PAM
uaaauggucuucuaguuccc

SEQ ID NO: 10636 - RNA, 20 nt, Artificial Sequence
  targeting sequence with CTCN PAM
auccuucaauacaacugcca

SEQ ID NO: 10637 - RNA, 20 nt, Artificial Sequence
  targeting sequence with CTCN PAM
ggcaguuguauugaaggaug

SEQ ID NO: 10638 - RNA, 20 nt, Artificial Sequence
  targeting sequence with CTCN PAM
ucacacuucugagaguggaa

SEQ ID NO: 10639 - RNA, 20 nt, Artificial Sequence
  targeting sequence with CTCN PAM
gaagugugaagagcagggga

SEQ ID NO: 10640 - RNA, 20 nt, Artificial Sequence
  targeting sequence with CTCN PAM
cagaagugugaagagcaggg

SEQ ID NO: 10641 - RNA, 20 nt, Artificial Sequence
  targeting sequence with CTCN PAM
uaaaaauauuuuucauagua

SEQ ID NO: 10642 - RNA, 20 nt, Artificial Sequence
  targeting sequence with CTCN PAM
gagggugacugugaaguuua

SEQ ID NO: 10643 - RNA, 20 nt, Artificial Sequence
  targeting sequence with CTCN PAM
gagguacauuucuggcuuua

SEQ ID NO: 10644 - RNA, 20 nt, Artificial Sequence
  targeting sequence with CTCN PAM
acuguaggcccuggcagggg

SEQ ID NO: 10645 - RNA, 20 nt, Artificial Sequence
  targeting sequence with CTCN PAM
ccuucaguccccugcacuac

SEQ ID NO: 10646 - RNA, 20 nt, Artificial Sequence
  targeting sequence with CTCN PAM
cucacucaacugugagcucc

SEQ ID NO: 10647 - RNA, 20 nt, Artificial Sequence
  targeting sequence with CTCN PAM
cucaacugugagcuccuagg

SEQ ID NO: 10648 - RNA, 20 nt, Artificial Sequence
  targeting sequence with CTCN PAM
acugugagcuccuaggaggu

SEQ ID NO: 10649 - RNA, 20 nt, Artificial Sequence
  targeting sequence with CTCN PAM
caguugagugagggagcaag

SEQ ID NO: 10650 - RNA, 20 nt, Artificial Sequence
  targeting sequence with CTCN PAM
uaggagguaguuuuauuacu

SEQ ID NO: 10651 - RNA, 20 nt, Artificial Sequence
  targeting sequence with CTCN PAM
uaggagcucacaguugagug

SEQ ID NO: 10652 - RNA, 20 nt, Artificial Sequence
  targeting sequence with CTCN PAM
ccucuaaaccaaaugcauua

SEQ ID NO: 10653 - RNA, 20 nt, Artificial Sequence
  targeting sequence with CTCN PAM
aaaccaaaugcauuagacac

SEQ ID NO: 10654 - RNA, 20 nt, Artificial Sequence
  targeting sequence with CTCN PAM
auaaaugcagaccaaaugaa

SEQ ID NO: 10655 - RNA, 20 nt, Artificial Sequence
  targeting sequence with CTCN PAM
auucauuuggucugcauuua

SEQ ID NO: 10656 - RNA, 20 nt, Artificial Sequence
  targeting sequence with CTCN PAM
cuuuuauuuaggaauguauu

SEQ ID NO: 10657 - RNA, 20 nt, Artificial Sequence
  targeting sequence with CTCN PAM
ugagguggagccguuucuag

SEQ ID NO: 10658 - RNA, 20 nt, Artificial Sequence
  targeting sequence with CTCN PAM
ugaguuaaagaauacguucc

SEQ ID NO: 10659 - RNA, 20 nt, Artificial Sequence
  targeting sequence with CTCN PAM
accucaugaguuaaagaaua

SEQ ID NO: 10660 - RNA, 20 nt, Artificial Sequence
  targeting sequence with CTCN PAM
aucaccuucuggccgacccu

SEQ ID NO: 10661 - RNA, 20 nt, Artificial Sequence
  targeting sequence with CTCN PAM
aaugcuaagucugggaacug

SEQ ID NO: 10662 - RNA, 20 nt, Artificial Sequence
  targeting sequence with CTCN PAM
aagguucuuccagcugcaac

SEQ ID NO: 10663 - RNA, 20 nt, Artificial Sequence
  targeting sequence with CTCN PAM
gauacuuuacuaugaaauua

SEQ ID NO: 10664 - RNA, 20 nt, Artificial Sequence
  targeting sequence with CTCN PAM
uuccuaauuucauaguaaag

SEQ ID NO: 10665 - RNA, 20 nt, Artificial Sequence
  targeting sequence with CTCN PAM
uucuuuucuuuucuccuucc

SEQ ID NO: 10666 - RNA, 20 nt, Artificial Sequence
  targeting sequence with CTCN PAM
ccuacucuuucuuuucuuuu

SEQ ID NO: 10667 - RNA, 20 nt, Artificial Sequence
  targeting sequence with CTCN PAM
accagcaucuucuggaaaac

SEQ ID NO: 10668 - RNA, 20 nt, Artificial Sequence
  targeting sequence with CTCN PAM
gaguuaaggaugcuaugaac

SEQ ID NO: 10669 - RNA, 20 nt, Artificial Sequence
  targeting sequence with CTCN PAM
gaguauucccauuuguauuc

SEQ ID NO: 10670 - RNA, 20 nt, Artificial Sequence
  targeting sequence with CTCN PAM
uucagccauuuuaauaaaau

SEQ ID NO: 10671 - RNA, 20 nt, Artificial Sequence
  targeting sequence with CTCN PAM
uggaagugugguauuuuaac

SEQ ID NO: 10672 - RNA, 20 nt, Artificial Sequence
  targeting sequence with CTCN PAM
cuuaguacuguaccuggccu

SEQ ID NO: 10673 - RNA, 20 nt, Artificial Sequence
  targeting sequence with CTCN PAM
cugaauccucacaaccugug

SEQ ID NO: 10674 - RNA, 20 nt, Artificial Sequence
  targeting sequence with CTCN PAM
caaccugugaagucagucau

SEQ ID NO: 10675 - RNA, 20 nt, Artificial Sequence
  targeting sequence with CTCN PAM
augacugacuucacagguug

SEQ ID NO: 10676 - RNA, 20 nt, Artificial Sequence
  targeting sequence with CTCN PAM
uugcuauuuacuaauuauau

SEQ ID NO: 10677 - RNA, 20 nt, Artificial Sequence
  targeting sequence with CTCN PAM
cuuugcuauuuacuaauuau

SEQ ID NO: 10678 - RNA, 20 nt, Artificial Sequence
  targeting sequence with CTCN PAM
ucugauauaggucuguagag

SEQ ID NO: 10679 - RNA, 20 nt, Artificial Sequence
  targeting sequence with CTCN PAM
gauauaggucuguagagaaa

SEQ ID NO: 10680 - RNA, 20 nt, Artificial Sequence
  targeting sequence with CTCN PAM
acagaccuauaucagaggag

SEQ ID NO: 10681 - RNA, 20 nt, Artificial Sequence
  targeting sequence with CTCN PAM
gccuuuucucuacagaccua

SEQ ID NO: 10682 - RNA, 20 nt, Artificial Sequence
  targeting sequence with CTCN PAM
uauuauaauauguuuugccc

SEQ ID NO: 10683 - RNA, 20 nt, Artificial Sequence
  targeting sequence with CTCN PAM
uuauaugaauuuccacuaug

SEQ ID NO: 10684 - RNA, 20 nt, Artificial Sequence
  targeting sequence with CTCN PAM
cgcuaccccagggaccaaca

SEQ ID NO: 10685 - RNA, 20 nt, Artificial Sequence
  targeting sequence with CTCN PAM
ggucucauuucuuauuuauu

SEQ ID NO: 10686 - RNA, 20 nt, Artificial Sequence
  targeting sequence with CTCN PAM
uuucuuauuuauuuauuuau

SEQ ID NO: 10687 - RNA, 20 nt, Artificial Sequence
  targeting sequence with CTCN PAM
uuucuaugcuuaaauuuuuc

SEQ ID NO: 10688 - RNA, 20 nt, Artificial Sequence
  targeting sequence with CTCN PAM
uugggaaaaauuuaagcaua

SEQ ID NO: 10689 - RNA, 20 nt, Artificial Sequence
  targeting sequence with CTCN PAM
cuuugggaaaaauuuaagca

SEQ ID NO: 10690 - RNA, 20 nt, Artificial Sequence
  targeting sequence with CTCN PAM
guuuuauucauuuuuaaucu

SEQ ID NO: 10691 - RNA, 20 nt, Artificial Sequence
  targeting sequence with CTCN PAM
uagccuaaguuguuuuuccu

SEQ ID NO: 10692 - RNA, 20 nt, Artificial Sequence
  targeting sequence with CTCN PAM
aaggcaguaugcuuguucuc

SEQ ID NO: 10693 - RNA, 20 nt, Artificial Sequence
  targeting sequence with CTCN PAM
ccuagagucucacuuaaagg

SEQ ID NO: 10694 - RNA, 20 nt, Artificial Sequence
  targeting sequence with CTCN PAM
uagagucucacuuaaaggcu

SEQ ID NO: 10695 - RNA, 20 nt, Artificial Sequence
  targeting sequence with CTCN PAM
aggagagcaucuuuuugcuc

SEQ ID NO: 10696 - RNA, 20 nt, Artificial Sequence
  targeting sequence with CTCN PAM
cuuaaaggcuaucuggcuau

SEQ ID NO: 10697 - RNA, 20 nt, Artificial Sequence
  targeting sequence with CTCN PAM
uuuaacugaggucuuaccuu

SEQ ID NO: 10698 - RNA, 20 nt, Artificial Sequence
  targeting sequence with CTCN PAM
guuaaacgagugauagccag

SEQ ID NO: 10699 - RNA, 20 nt, Artificial Sequence
  targeting sequence with CTCN PAM
uuacagaaacagcaguacac

SEQ ID NO: 10700 - RNA, 20 nt, Artificial Sequence
  targeting sequence with CTCN PAM
augagugccaagagcgagcc

SEQ ID NO: 10701 - RNA, 20 nt, Artificial Sequence
  targeting sequence with CTCN PAM
uugagaugguaguguacugc

SEQ ID NO: 10702 - RNA, 20 nt, Artificial Sequence
  targeting sequence with CTCN PAM
uggcacucauugagauggua

SEQ ID NO: 10703 - RNA, 20 nt, Artificial Sequence
  targeting sequence with CTCN PAM
cucuuggcacucauugagau

SEQ ID NO: 10704 - RNA, 20 nt, Artificial Sequence
  targeting sequence with CTCN PAM
cgcaaagcaaacauuaccug

SEQ ID NO: 10705 - RNA, 20 nt, Artificial Sequence
  targeting sequence with CTCN PAM
ugucacaguuaacacuccau

SEQ ID NO: 10706 - RNA, 20 nt, Artificial Sequence
  targeting sequence with CTCN PAM
aucuguuguugcugccuuua

SEQ ID NO: 10707 - RNA, 20 nt, Artificial Sequence
  targeting sequence with CTCN PAM
ugaaaaagugcacauuugca

SEQ ID NO: 10708 - RNA, 20 nt, Artificial Sequence
  targeting sequence with CTCN PAM
cacaauuaaaauaaucacca

SEQ ID NO: 10709 - RNA, 20 nt, Artificial Sequence
  targeting sequence with CTCN PAM
aucuuccaguccuucuuccc

SEQ ID NO: 10710 - RNA, 20 nt, Artificial Sequence
  targeting sequence with CTCN PAM
gcuggaaggggaagguugga

SEQ ID NO: 10711 - RNA, 20 nt, Artificial Sequence
  targeting sequence with CTCN PAM
auccaaccuuccccuuccag

SEQ ID NO: 10712 - RNA, 20 nt, Artificial Sequence
  targeting sequence with CTCN PAM
uccucaauccaaccuucccc

SEQ ID NO: 10713 - RNA, 20 nt, Artificial Sequence
  targeting sequence with CTCN PAM
aucauggugccuguguggcu

SEQ ID NO: 10714 - RNA, 20 nt, Artificial Sequence
  targeting sequence with CTCN PAM
ccaucauggugccugugugg

SEQ ID NO: 10715 - RNA, 20 nt, Artificial Sequence
  targeting sequence with CTCN PAM
gcucuccaucauggugccug

SEQ ID NO: 10716 - RNA, 20 nt, Artificial Sequence
  targeting sequence with CTCN PAM
cagcucuccaucauggugcc

SEQ ID NO: 10717 - RNA, 20 nt, Artificial Sequence
  targeting sequence with CTCN PAM
ugagguuuaacaacacacgu

SEQ ID NO: 10718 - RNA, 20 nt, Artificial Sequence
  targeting sequence with CTCN PAM
ggagugugggugggcugcuc

SEQ ID NO: 10719 - RNA, 20 nt, Artificial Sequence
  targeting sequence with CTCN PAM
gaaccacguguguuguuaaa

SEQ ID NO: 10720 - RNA, 20 nt, Artificial Sequence
  targeting sequence with CTCN PAM
uuuguguguuccugguccug

SEQ ID NO: 10721 - RNA, 20 nt, Artificial Sequence
  targeting sequence with CTCN PAM
acaauuaacgaaaugauuuu

SEQ ID NO: 10722 - RNA, 20 nt, Artificial Sequence
  targeting sequence with CTCN PAM
cucuggggcccugaugggua

SEQ ID NO: 10723 - RNA, 20 nt, Artificial Sequence
  targeting sequence with CTCN PAM
ggggcccugauggguagcug

SEQ ID NO: 10724 - RNA, 20 nt, Artificial Sequence
  targeting sequence with CTCN PAM
agguccagcccagccagcua

SEQ ID NO: 10725 - RNA, 20 nt, Artificial Sequence
  targeting sequence with CTCN PAM
uccacuaauuauuucuuuuu

SEQ ID NO: 10726 - RNA, 20 nt, Artificial Sequence
  targeting sequence with CTCN PAM
ucaugccaaacauaacucgu

SEQ ID NO: 10727 - RNA, 20 nt, Artificial Sequence
  targeting sequence with CTCN PAM
uaacaaaaagcaauuuuccu

SEQ ID NO: 10728 - RNA, 20 nt, Artificial Sequence
  targeting sequence with CTCN PAM
aacaggagggaaaaaaaugg

SEQ ID NO: 10729 - RNA, 20 nt, Artificial Sequence
  targeting sequence with CTCN PAM
uguuugaggaaaauugcuuu

SEQ ID NO: 10730 - RNA, 20 nt, Artificial Sequence
  targeting sequence with CTCN PAM
aacagguaagguuucccuuc

SEQ ID NO: 10731 - RNA, 20 nt, Artificial Sequence
  targeting sequence with CTCN PAM
ucauggaggggcaacagagg

SEQ ID NO: 10732 - RNA, 20 nt, Artificial Sequence
  targeting sequence with CTCN PAM
uggaggggcaacagagggcu

SEQ ID NO: 10733 - RNA, 20 nt, Artificial Sequence
  targeting sequence with CTCN PAM
augaggagguagaagccuug

SEQ ID NO: 10734 - RNA, 20 nt, Artificial Sequence
  targeting sequence with CTCN PAM
guugccccuccaugaggagg

SEQ ID NO: 10735 - RNA, 20 nt, Artificial Sequence
  targeting sequence with CTCN PAM
agcccucuguugccccucca

SEQ ID NO: 10736 - RNA, 20 nt, Artificial Sequence
  targeting sequence with CTCN PAM
cucaagcccucuguugcccc

SEQ ID NO: 10737 - RNA, 20 nt, Artificial Sequence
  targeting sequence with CTCN PAM
uggcauauuuaagcaacgac

SEQ ID NO: 10738 - RNA, 20 nt, Artificial Sequence
  targeting sequence with CTCN PAM
uaaagcuccuggcauauuua

SEQ ID NO: 10739 - RNA, 20 nt, Artificial Sequence
  targeting sequence with CTCN PAM
ccugguguuacuccacaaaa

SEQ ID NO: 10740 - RNA, 20 nt, Artificial Sequence
  targeting sequence with CTCN PAM
acaaaauacacauccauaag

SEQ ID NO: 10741 - RNA, 20 nt, Artificial Sequence
  targeting sequence with CTCN PAM
uucaagacucgcacacacac

SEQ ID NO: 10742 - RNA, 20 nt, Artificial Sequence
  targeting sequence with CTCN PAM
cacacacacugaguacucuc

SEQ ID NO: 10743 - RNA, 20 nt, Artificial Sequence
  targeting sequence with CTCN PAM
gugugugugcgagucuugaa

SEQ ID NO: 10744 - RNA, 20 nt, Artificial Sequence
  targeting sequence with CTCN PAM
cacagaguacucacacacug

SEQ ID NO: 10745 - RNA, 20 nt, Artificial Sequence
  targeting sequence with CTCN PAM
cagaguacucacacacugag

SEQ ID NO: 10746 - RNA, 20 nt, Artificial Sequence
  targeting sequence with CTCN PAM
gugagaguacucagugugug

SEQ ID NO: 10747 - RNA, 20 nt, Artificial Sequence
  targeting sequence with CTCN PAM
cacacugaguacucacacac

SEQ ID NO: 10748 - RNA, 20 nt, Artificial Sequence
  targeting sequence with CTCN PAM
gugugugaguacucugugag

SEQ ID NO: 10749 - RNA, 20 nt, Artificial Sequence
  targeting sequence with CTCN PAM
cacacugaguacucgcagag

SEQ ID NO: 10750 - RNA, 20 nt, Artificial Sequence
  targeting sequence with CTCN PAM
gugugugaguacucagugug

SEQ ID NO: 10751 - RNA, 20 nt, Artificial Sequence
  targeting sequence with CTCN PAM
cagaguacuugcacacacag

SEQ ID NO: 10752 - RNA, 20 nt, Artificial Sequence
  targeting sequence with CTCN PAM
gcgaguacucagugugugag

SEQ ID NO: 10753 - RNA, 20 nt, Artificial Sequence
  targeting sequence with CTCN PAM
cacacagaguacucgugcac

SEQ ID NO: 10754 - RNA, 20 nt, Artificial Sequence
  targeting sequence with CTCN PAM
gugugugaguacugugugug

SEQ ID NO: 10755 - RNA, 20 nt, Artificial Sequence
  targeting sequence with CTCN PAM
ugcacacugagcacucacac

SEQ ID NO: 10756 - RNA, 20 nt, Artificial Sequence
  targeting sequence with CTCN PAM
gugugcacgaguacucugug

SEQ ID NO: 10757 - RNA, 20 nt, Artificial Sequence
  targeting sequence with CTCN PAM
cacacaguacucgcacacac

SEQ ID NO: 10758 - RNA, 20 nt, Artificial Sequence
  targeting sequence with CTCN PAM
cacacacagagaacucgcac

SEQ ID NO: 10759 - RNA, 20 nt, Artificial Sequence
  targeting sequence with CTCN PAM
gugugugcgaguacugugug

SEQ ID NO: 10760 - RNA, 20 nt, Artificial Sequence
  targeting sequence with CTCN PAM
cacacagaguacucgcacac

SEQ ID NO: 10761 - RNA, 20 nt, Artificial Sequence
  targeting sequence with CTCN PAM
gugugcgaguucucugugug

SEQ ID NO: 10762 - RNA, 20 nt, Artificial Sequence
  targeting sequence with CTCN PAM
cacacacacugaguacucac

SEQ ID NO: 10763 - RNA, 20 nt, Artificial Sequence
  targeting sequence with CTCN PAM
gugugugugcgaguacucug

SEQ ID NO: 10764 - RNA, 20 nt, Artificial Sequence
  targeting sequence with CTCN PAM
caaacacacugaguacucac

SEQ ID NO: 10765 - RNA, 20 nt, Artificial Sequence
  targeting sequence with CTCN PAM
guguguuugugaguacucag

SEQ ID NO: 10766 - RNA, 20 nt, Artificial Sequence
  targeting sequence with CTCN PAM
cacagcggaucccucacagu

SEQ ID NO: 10767 - RNA, 20 nt, Artificial Sequence
  targeting sequence with CTCN PAM
cagucuaggggggauaccua

SEQ ID NO: 10768 - RNA, 20 nt, Artificial Sequence
  targeting sequence with CTCN PAM
auaaucuuucaaagagguaa

SEQ ID NO: 10769 - RNA, 20 nt, Artificial Sequence
  targeting sequence with CTCN PAM
uugaaagauuauggaguggg

SEQ ID NO: 10770 - RNA, 20 nt, Artificial Sequence
  targeting sequence with CTCN PAM
acuguaucuucaguggcagc

SEQ ID NO: 10771 - RNA, 20 nt, Artificial Sequence
  targeting sequence with CTCN PAM
aacaacuguucucaaauaau

SEQ ID NO: 10772 - RNA, 20 nt, Artificial Sequence
  targeting sequence with CTCN PAM
aauaauggcuaacaccaccu

SEQ ID NO: 10773 - RNA, 20 nt, Artificial Sequence
  targeting sequence with CTCN PAM
uucuauauggguugauucug

SEQ ID NO: 10774 - RNA, 20 nt, Artificial Sequence
  targeting sequence with CTCN PAM
caaaauuagguagcuuuguc

SEQ ID NO: 10775 - RNA, 20 nt, Artificial Sequence
  targeting sequence with CTCN PAM
ucuaaaaagacaaagcuacc

SEQ ID NO: 10776 - RNA, 20 nt, Artificial Sequence
  targeting sequence with CTCN PAM
aacucaucuaaaaagacaaa

SEQ ID NO: 10777 - RNA, 20 nt, Artificial Sequence
  targeting sequence with CTCN PAM
gccuuauaacacaaccaccu

SEQ ID NO: 10778 - RNA, 20 nt, Artificial Sequence
  targeting sequence with CTCN PAM
ggugguuguguuauaaggca

SEQ ID NO: 10779 - RNA, 20 nt, Artificial Sequence
  targeting sequence with CTCN PAM
aaugucccuuuagagaguca

SEQ ID NO: 10780 - RNA, 20 nt, Artificial Sequence
  targeting sequence with CTCN PAM
aaagggacauuggaggaaca

SEQ ID NO: 10781 - RNA, 20 nt, Artificial Sequence
  targeting sequence with CTCN PAM
cuaaagggacauuggaggaa

SEQ ID NO: 10782 - RNA, 20 nt, Artificial Sequence
  targeting sequence with CTCN PAM
aucagaaggaugcucugugu

SEQ ID NO: 10783 - RNA, 20 nt, Artificial Sequence
  targeting sequence with CTCN PAM
guguuuuuauuuaguuuccu

SEQ ID NO: 10784 - RNA, 20 nt, Artificial Sequence
  targeting sequence with CTCN PAM
gacccagaagcuacuaggaa

SEQ ID NO: 10785 - RNA, 20 nt, Artificial Sequence
  targeting sequence with CTCN PAM
acaaggucauacagcuaguu

SEQ ID NO: 10786 - RNA, 20 nt, Artificial Sequence
  targeting sequence with CTCN PAM
ucauagguuuguuacgggga

SEQ ID NO: 10787 - RNA, 20 nt, Artificial Sequence
  targeting sequence with CTCN PAM
uagguuuguuacggggauca

SEQ ID NO: 10788 - RNA, 20 nt, Artificial Sequence
  targeting sequence with CTCN PAM
uccugggucuugucaugaua

SEQ ID NO: 10789 - RNA, 20 nt, Artificial Sequence
  targeting sequence with CTCN PAM
cagaacuaauaacacaguca

SEQ ID NO: 10790 - RNA, 20 nt, Artificial Sequence
  targeting sequence with CTCN PAM
uuaucucauuauaccugggg

SEQ ID NO: 10791 - RNA, 20 nt, Artificial Sequence
  targeting sequence with CTCN PAM
uuauaccuggggaauuaugu

SEQ ID NO: 10792 - RNA, 20 nt, Artificial Sequence
  targeting sequence with CTCN PAM
aaacauaauuccccagguau

SEQ ID NO: 10793 - RNA, 20 nt, Artificial Sequence
  targeting sequence with CTCN PAM
uaguuucgugaaccugaccg

SEQ ID NO: 10794 - RNA, 20 nt, Artificial Sequence
  targeting sequence with CTCN PAM
agcccacaccauggcuauuu

SEQ ID NO: 10795 - RNA, 20 nt, Artificial Sequence
  targeting sequence with CTCN PAM
uuuaucaccuuaauuugaac

SEQ ID NO: 10796 - RNA, 20 nt, Artificial Sequence
  targeting sequence with CTCN PAM
gaauuagcuuuuaauccuaa

SEQ ID NO: 10797 - RNA, 20 nt, Artificial Sequence
  targeting sequence with CTCN PAM
uuaggauuaaaagcuaauuc

SEQ ID NO: 10798 - RNA, 20 nt, Artificial Sequence
  targeting sequence with CTCN PAM
caccucucccaaaugaauga

SEQ ID NO: 10799 - RNA, 20 nt, Artificial Sequence
  targeting sequence with CTCN PAM
ccucucccaaaugaaugaug

SEQ ID NO: 10800 - RNA, 20 nt, Artificial Sequence
  targeting sequence with CTCN PAM
cccaaaugaaugaugacuca

SEQ ID NO: 10801 - RNA, 20 nt, Artificial Sequence
  targeting sequence with CTCN PAM
caaaugaaugaugacucacu

SEQ ID NO: 10802 - RNA, 20 nt, Artificial Sequence
  targeting sequence with CTCN PAM
cuuucucuuauggcaaacua

SEQ ID NO: 10803 - RNA, 20 nt, Artificial Sequence
  targeting sequence with CTCN PAM
uauggcaaacuaguaaaaua

SEQ ID NO: 10804 - RNA, 20 nt, Artificial Sequence
  targeting sequence with CTCN PAM
acuagcaaguagucgaauga

SEQ ID NO: 10805 - RNA, 20 nt, Artificial Sequence
  targeting sequence with CTCN PAM
uucgacuacuugcuaguuga

SEQ ID NO: 10806 - RNA, 20 nt, Artificial Sequence
  targeting sequence with CTCN PAM
uguuucucauucgacuacuu

SEQ ID NO: 10807 - RNA, 20 nt, Artificial Sequence
  targeting sequence with CTCN PAM
ccaagcuagacaaauucagu

SEQ ID NO: 10808 - RNA, 20 nt, Artificial Sequence
  targeting sequence with CTCN PAM
aagcuagacaaauucaguau

SEQ ID NO: 10809 - RNA, 20 nt, Artificial Sequence
  targeting sequence with CTCN PAM
ucauucuaagauauguuaag

SEQ ID NO: 10810 - RNA, 20 nt, Artificial Sequence
  targeting sequence with CTCN PAM
ucccaaaggaauguugguaa

SEQ ID NO: 10811 - RNA, 20 nt, Artificial Sequence
  targeting sequence with CTCN PAM
ugcuugugcugaacuccauc

SEQ ID NO: 10812 - RNA, 20 nt, Artificial Sequence
  targeting sequence with CTCN PAM
aucgacguaucugucaucag

SEQ ID NO: 10813 - RNA, 20 nt, Artificial Sequence
  targeting sequence with CTCN PAM
ucauauuauuucugacgaca

SEQ ID NO: 10814 - RNA, 20 nt, Artificial Sequence
  targeting sequence with CTCN PAM
gugcuugacagaagagguca

SEQ ID NO: 10815 - RNA, 20 nt, Artificial Sequence
  targeting sequence with CTCN PAM
ucugucaagcacugagaaau

SEQ ID NO: 10816 - RNA, 20 nt, Artificial Sequence
  targeting sequence with CTCN PAM
aaggguuauauuaacucaua

SEQ ID NO: 10817 - RNA, 20 nt, Artificial Sequence
  targeting sequence with CTCN PAM
uauucuaaaaccagucccuu

SEQ ID NO: 10818 - RNA, 20 nt, Artificial Sequence
  targeting sequence with CTCN PAM
guaccuacagugaauccaua

SEQ ID NO: 10819 - RNA, 20 nt, Artificial Sequence
  targeting sequence with CTCN PAM
guauaaugggaaaaacucug

SEQ ID NO: 10820 - RNA, 20 nt, Artificial Sequence
  targeting sequence with CTCN PAM
gaggcuggagaucugcaggu

SEQ ID NO: 10821 - RNA, 20 nt, Artificial Sequence
  targeting sequence with CTCN PAM
gaguuuuucccauuauacug

SEQ ID NO: 10822 - RNA, 20 nt, Artificial Sequence
  targeting sequence with CTCN PAM
agccucagaguuuuucccau

SEQ ID NO: 10823 - RNA, 20 nt, Artificial Sequence
  targeting sequence with CTCN PAM
accacucacugugccgcgua

SEQ ID NO: 10824 - RNA, 20 nt, Artificial Sequence
  targeting sequence with CTCN PAM
cugugccgcguaaugugagu

SEQ ID NO: 10825 - RNA, 20 nt, Artificial Sequence
  targeting sequence with CTCN PAM
cauuacgcggcacagugagu

SEQ ID NO: 10826 - RNA, 20 nt, Artificial Sequence
  targeting sequence with CTCN PAM
cucacauuacgcggcacagu

SEQ ID NO: 10827 - RNA, 20 nt, Artificial Sequence
  targeting sequence with CTCN PAM
agauacuguuguggugaaga

SEQ ID NO: 10828 - RNA, 20 nt, Artificial Sequence
  targeting sequence with CTCN PAM
gccaguacaugaagaacuca

SEQ ID NO: 10829 - RNA, 20 nt, Artificial Sequence
  targeting sequence with CTCN PAM
cuauucugccuacuuuguga

SEQ ID NO: 10830 - RNA, 20 nt, Artificial Sequence
  targeting sequence with CTCN PAM
aaaucacaaaguaggcagaa

SEQ ID NO: 10831 - RNA, 20 nt, Artificial Sequence
  targeting sequence with CTCN PAM
acaaaugcaaaauaguauua

SEQ ID NO: 10832 - RNA, 20 nt, Artificial Sequence
  targeting sequence with CTCN PAM
uccauauccaaggccccauu

SEQ ID NO: 10833 - RNA, 20 nt, Artificial Sequence
  targeting sequence with CTCN PAM
guguguggauacuauguuga

SEQ ID NO: 10834 - RNA, 20 nt, Artificial Sequence
  targeting sequence with CTCN PAM
uuaguguuaaaaaaacaagu

SEQ ID NO: 10835 - RNA, 20 nt, Artificial Sequence
  targeting sequence with CTCN PAM
gcuuucucuuuaguguuaaa

SEQ ID NO: 10836 - RNA, 20 nt, Artificial Sequence
  targeting sequence with CTCN PAM
cagcuuucucuuuaguguua

SEQ ID NO: 10837 - RNA, 20 nt, Artificial Sequence
  targeting sequence with CTCN PAM
cuuagcaggaaaggaaaaau

SEQ ID NO: 10838 - RNA, 20 nt, Artificial Sequence
  targeting sequence with CTCN PAM
ggcuuugacaccagcagagc

SEQ ID NO: 10839 - RNA, 20 nt, Artificial Sequence
  targeting sequence with CTCN PAM
gcuggugucaaagccagagu

SEQ ID NO: 10840 - RNA, 20 nt, Artificial Sequence
  targeting sequence with CTCN PAM
accaaugcauuagcuuugug

SEQ ID NO: 10841 - RNA, 20 nt, Artificial Sequence
  targeting sequence with CTCN PAM
gagcuuuacuccuugccuga

SEQ ID NO: 10842 - RNA, 20 nt, Artificial Sequence
  targeting sequence with CTCN PAM
gagauguuaaguaaguuguc

SEQ ID NO: 10843 - RNA, 20 nt, Artificial Sequence
  targeting sequence with CTCN PAM
uugccugagaauggggauga

SEQ ID NO: 10844 - RNA, 20 nt, Artificial Sequence
  targeting sequence with CTCN PAM
ggcaaggaguaaagcucaga

SEQ ID NO: 10845 - RNA, 20 nt, Artificial Sequence
  targeting sequence with CTCN PAM
caguucaucaaaauuaagca

SEQ ID NO: 10846 - RNA, 20 nt, Artificial Sequence
  targeting sequence with CTCN PAM
auaaauaguacuuauuacca

SEQ ID NO: 10847 - RNA, 20 nt, Artificial Sequence
  targeting sequence with CTCN PAM
cauccaucguauuucuuuua

SEQ ID NO: 10848 - RNA, 20 nt, Artificial Sequence
  targeting sequence with CTCN PAM
uguuugaaauugcuuuauug

SEQ ID NO: 10849 - RNA, 20 nt, Artificial Sequence
  targeting sequence with CTCN PAM
ccuguuugaaauugcuuuau

SEQ ID NO: 10850 - RNA, 20 nt, Artificial Sequence
  targeting sequence with CTCN PAM
guaagccgaggugggcagau

SEQ ID NO: 10851 - RNA, 20 nt, Artificial Sequence
  targeting sequence with CTCN PAM
gcuuaccgagguuguuuugu

SEQ ID NO: 10852 - RNA, 20 nt, Artificial Sequence
  targeting sequence with CTCN PAM
agugaucugcccaccucggc

SEQ ID NO: 10853 - RNA, 20 nt, Artificial Sequence
  targeting sequence with CTCN PAM
ugggcucaagugaucugccc

SEQ ID NO: 10854 - RNA, 20 nt, Artificial Sequence
  targeting sequence with CTCN PAM
aacuccugggcucaagugau

SEQ ID NO: 10855 - RNA, 20 nt, Artificial Sequence
  targeting sequence with CTCN PAM
gcccccugguagcugggacu

SEQ ID NO: 10856 - RNA, 20 nt, Artificial Sequence
  targeting sequence with CTCN PAM
ucagcccccugguagcuggg

SEQ ID NO: 10857 - RNA, 20 nt, Artificial Sequence
  targeting sequence with CTCN PAM
cuccucagcccccugguagc

SEQ ID NO: 10858 - RNA, 20 nt, Artificial Sequence
  targeting sequence with CTCN PAM
aaucugggugacagcaaacc

SEQ ID NO: 10859 - RNA, 20 nt, Artificial Sequence
  targeting sequence with CTCN PAM
gucaccagguuugcugucac

SEQ ID NO: 10860 - RNA, 20 nt, Artificial Sequence
  targeting sequence with CTCN PAM
cucugucaccagguuugcug

SEQ ID NO: 10861 - RNA, 20 nt, Artificial Sequence
  targeting sequence with CTCN PAM
aacagacaacaaacaaaaaa

SEQ ID NO: 10862 - RNA, 20 nt, Artificial Sequence
  targeting sequence with CTCN PAM
uguucaaaugaaaaggaagu

SEQ ID NO: 10863 - RNA, 20 nt, Artificial Sequence
  targeting sequence with CTCN PAM
ggggcugugaacaaggcugu

SEQ ID NO: 10864 - RNA, 20 nt, Artificial Sequence
  targeting sequence with CTCN PAM
cuggggcugugaacaaggcu

SEQ ID NO: 10865 - RNA, 20 nt, Artificial Sequence
  targeting sequence with CTCN PAM
ccagucagaauccaccuuuc

SEQ ID NO: 10866 - RNA, 20 nt, Artificial Sequence
  targeting sequence with CTCN PAM
uaugacuuugucacuaguua

SEQ ID NO: 10867 - RNA, 20 nt, Artificial Sequence
  targeting sequence with CTCN PAM
aaagaauuuucaagucucua

SEQ ID NO: 10868 - RNA, 20 nt, Artificial Sequence
  targeting sequence with CTCN PAM
augguacuacuacuuagacu

SEQ ID NO: 10869 - RNA, 20 nt, Artificial Sequence
  targeting sequence with CTCN PAM
uaggggccagucggcaaaac

SEQ ID NO: 10870 - RNA, 20 nt, Artificial Sequence
  targeting sequence with CTCN PAM
gcggcacaugaucagcuucc

SEQ ID NO: 10871 - RNA, 20 nt, Artificial Sequence
  targeting sequence with CTCN PAM
gaagaagaucuccagcccua

SEQ ID NO: 10872 - RNA, 20 nt, Artificial Sequence
  targeting sequence with CTCN PAM
agcccuaauuccuugcuguc

SEQ ID NO: 10873 - RNA, 20 nt, Artificial Sequence
  targeting sequence with CTCN PAM
auaucuugugacagcaagga

SEQ ID NO: 10874 - RNA, 20 nt, Artificial Sequence
  targeting sequence with CTCN PAM
uuaaaacuuuccauuuagcu

SEQ ID NO: 10875 - RNA, 20 nt, Artificial Sequence
  targeting sequence with CTCN PAM
ugagccucacauugcuucac

SEQ ID NO: 10876 - RNA, 20 nt, Artificial Sequence
  targeting sequence with CTCN PAM
ggaguuuuuuuaauuagauu

SEQ ID NO: 10877 - RNA, 20 nt, Artificial Sequence
  targeting sequence with CTCN PAM
cauugcuucacaauaacuac

SEQ ID NO: 10878 - RNA, 20 nt, Artificial Sequence
  targeting sequence with CTCN PAM
uugauagcaguagaagucug

SEQ ID NO: 10879 - RNA, 20 nt, Artificial Sequence
  targeting sequence with CTCN PAM
ucagaauucuuacaaguaau

SEQ ID NO: 10880 - RNA, 20 nt, Artificial Sequence
  targeting sequence with CTCN PAM
aaaaaauuuuuagacuggau

SEQ ID NO: 10881 - RNA, 20 nt, Artificial Sequence
  targeting sequence with CTCN PAM
guacuuuuuccuguucaaca

SEQ ID NO: 10882 - RNA, 20 nt, Artificial Sequence
  targeting sequence with CTCN PAM
guuggacaaagacgucccag

SEQ ID NO: 10883 - RNA, 20 nt, Artificial Sequence
  targeting sequence with CTCN PAM
aguaacugaugaaggcuuuu

SEQ ID NO: 10884 - RNA, 20 nt, Artificial Sequence
  targeting sequence with CTCN PAM
aaccaguuaaaaagccuuca

SEQ ID NO: 10885 - RNA, 20 nt, Artificial Sequence
  targeting sequence with CTCN PAM
aauuaauccuguuauaaaug

SEQ ID NO: 10886 - RNA, 20 nt, Artificial Sequence
  targeting sequence with CTCN PAM
gauucagauggacuuaugcu

SEQ ID NO: 10887 - RNA, 20 nt, Artificial Sequence
  targeting sequence with CTCN PAM
ucaaagcauaaguccaucug

SEQ ID NO: 10888 - RNA, 20 nt, Artificial Sequence
  targeting sequence with CTCN PAM
ggaagguaaaauggauaauu

SEQ ID NO: 10889 - RNA, 20 nt, Artificial Sequence
  targeting sequence with CTCN PAM
gaaaucuaggaacugaaacu

SEQ ID NO: 10890 - RNA, 20 nt, Artificial Sequence
  targeting sequence with CTCN PAM
gcgguagaauugaugcccuu

SEQ ID NO: 10891 - RNA, 20 nt, Artificial Sequence
  targeting sequence with CTCN PAM
agagccaguaucucucuguc

SEQ ID NO: 10892 - RNA, 20 nt, Artificial Sequence
  targeting sequence with CTCN PAM
ggagaaaaugugacucagcg

SEQ ID NO: 10893 - RNA, 20 nt, Artificial Sequence
  targeting sequence with CTCN PAM
cugucucuuaaaaaaaggug

SEQ ID NO: 10894 - RNA, 20 nt, Artificial Sequence
  targeting sequence with CTCN PAM
gucucuuaaaaaaagguggg

SEQ ID NO: 10895 - RNA, 20 nt, Artificial Sequence
  targeting sequence with CTCN PAM
uaaaaaaaggugggguguuu

SEQ ID NO: 10896 - RNA, 20 nt, Artificial Sequence
  targeting sequence with CTCN PAM
cuccacuacguuacuucuuc

SEQ ID NO: 10897 - RNA, 20 nt, Artificial Sequence
  targeting sequence with CTCN PAM
acuacguuacuucuucacau

SEQ ID NO: 10898 - RNA, 20 nt, Artificial Sequence
  targeting sequence with CTCN PAM
aucggcuugguuuccagccc

SEQ ID NO: 10899 - RNA, 20 nt, Artificial Sequence
  targeting sequence with CTCN PAM
gccgugaacuuacuugagag

SEQ ID NO: 10900 - RNA, 20 nt, Artificial Sequence
  targeting sequence with CTCN PAM
aguaaguucacggcugaguc

SEQ ID NO: 10901 - RNA, 20 nt, Artificial Sequence
  targeting sequence with CTCN PAM
caaguaaguucacggcugag

SEQ ID NO: 10902 - RNA, 20 nt, Artificial Sequence
  targeting sequence with CTCN PAM
uggaaagcuuugaaaaacau

SEQ ID NO: 10903 - RNA, 20 nt, Artificial Sequence
  targeting sequence with CTCN PAM
caccccaacuguuuuuggac

SEQ ID NO: 10904 - RNA, 20 nt, Artificial Sequence
  targeting sequence with CTCN PAM
cauuaguucguuuccucuga

SEQ ID NO: 10905 - RNA, 20 nt, Artificial Sequence
  targeting sequence with CTCN PAM
uuaguucguuuccucugaag

SEQ ID NO: 10906 - RNA, 20 nt, Artificial Sequence
  targeting sequence with CTCN PAM
gaagaugguauucauacuuc

SEQ ID NO: 10907 - RNA, 20 nt, Artificial Sequence
  targeting sequence with CTCN PAM
ugccacccacuuuaucuugu

SEQ ID NO: 10908 - RNA, 20 nt, Artificial Sequence
  targeting sequence with CTCN PAM
ccccguaaauggaaauggug

SEQ ID NO: 10909 - RNA, 20 nt, Artificial Sequence
  targeting sequence with CTCN PAM
gugaauucugucugaugccc

SEQ ID NO: 10910 - RNA, 20 nt, Artificial Sequence
  targeting sequence with CTCN PAM
uucugccgccugcuguccug

SEQ ID NO: 10911 - RNA, 20 nt, Artificial Sequence
  targeting sequence with CTCN PAM
aaaggcaggacagcaggcgg

SEQ ID NO: 10912 - RNA, 20 nt, Artificial Sequence
  targeting sequence with CTCN PAM
agggaggcugcacuaacucu

SEQ ID NO: 10913 - RNA, 20 nt, Artificial Sequence
  targeting sequence with CTCN PAM
cuagagauggggucaggccg

SEQ ID NO: 10914 - RNA, 20 nt, Artificial Sequence
  targeting sequence with CTCN PAM
gccuuuauccuuuguuuggg

SEQ ID NO: 10915 - RNA, 20 nt, Artificial Sequence
  targeting sequence with CTCN PAM
aaguugcacagcaaagccaa

SEQ ID NO: 10916 - RNA, 20 nt, Artificial Sequence
  targeting sequence with CTCN PAM
augaacuaaauacagauucu

SEQ ID NO: 10917 - RNA, 20 nt, Artificial Sequence
  targeting sequence with CTCN PAM
agcuaauguuuauaagaagc

SEQ ID NO: 10918 - RNA, 20 nt, Artificial Sequence
  targeting sequence with CTCN PAM
cuuuucagaguccuuucuca

SEQ ID NO: 10919 - RNA, 20 nt, Artificial Sequence
  targeting sequence with CTCN PAM
agaaacacucccuuuucaga

SEQ ID NO: 10920 - RNA, 20 nt, Artificial Sequence
  targeting sequence with CTCN PAM
cuagaaacacucccuuuuca

SEQ ID NO: 10921 - RNA, 20 nt, Artificial Sequence
  targeting sequence with CTCN PAM
uucuuauuaccugcaauuua

SEQ ID NO: 10922 - RNA, 20 nt, Artificial Sequence
  targeting sequence with CTCN PAM
uuuuuaaaacguuauuuaua

SEQ ID NO: 10923 - RNA, 20 nt, Artificial Sequence
  targeting sequence with CTCN PAM
agaaugguggccacagcaac

SEQ ID NO: 10924 - RNA, 20 nt, Artificial Sequence
  targeting sequence with CTCN PAM
uacuucucucacauugcacu

SEQ ID NO: 10925 - RNA, 20 nt, Artificial Sequence
  targeting sequence with CTCN PAM
cacauugcacuccaguaaga

SEQ ID NO: 10926 - RNA, 20 nt, Artificial Sequence
  targeting sequence with CTCN PAM
cauugcacuccaguaagaaa

SEQ ID NO: 10927 - RNA, 20 nt, Artificial Sequence
  targeting sequence with CTCN PAM
aguaagaaaauccugaaaga

SEQ ID NO: 10928 - RNA, 20 nt, Artificial Sequence
  targeting sequence with CTCN PAM
uucuuucaggauuuucuuac

SEQ ID NO: 10929 - RNA, 20 nt, Artificial Sequence
  targeting sequence with CTCN PAM
gaaguauuuuaaauugcaga

SEQ ID NO: 10930 - RNA, 20 nt, Artificial Sequence
  targeting sequence with CTCN PAM
cugaaguauuuuaaauugca

SEQ ID NO: 10931 - RNA, 20 nt, Artificial Sequence
  targeting sequence with CTCN PAM
uauuuuaguaacuuuaaaca

SEQ ID NO: 10932 - RNA, 20 nt, Artificial Sequence
  targeting sequence with CTCN PAM
ucacuaucaauugcuaugau

SEQ ID NO: 10933 - RNA, 20 nt, Artificial Sequence
  targeting sequence with CTCN PAM
aucaggaagaauguagaagu

SEQ ID NO: 10934 - RNA, 20 nt, Artificial Sequence
  targeting sequence with CTCN PAM
agaaucccagugaauuacuu

SEQ ID NO: 10935 - RNA, 20 nt, Artificial Sequence
  targeting sequence with CTCN PAM
aaucuauuucauucagcaac

SEQ ID NO: 10936 - RNA, 20 nt, Artificial Sequence
  targeting sequence with CTCN PAM
ucuuguggucacugaauacu

SEQ ID NO: 10937 - RNA, 20 nt, Artificial Sequence
  targeting sequence with CTCN PAM
ggcaaguauucagugaccac

SEQ ID NO: 10938 - RNA, 20 nt, Artificial Sequence
  targeting sequence with CTCN PAM
aaaaucaucucaggcaagua

SEQ ID NO: 10939 - RNA, 20 nt, Artificial Sequence
  targeting sequence with CTCN PAM
cuguuucagugaagagaguu

SEQ ID NO: 10940 - RNA, 20 nt, Artificial Sequence
  targeting sequence with CTCN PAM
aaaucacuggaagagacaca

SEQ ID NO: 10941 - RNA, 20 nt, Artificial Sequence
  targeting sequence with CTCN PAM
uccagugauuuagagcugaa

SEQ ID NO: 10942 - RNA, 20 nt, Artificial Sequence
  targeting sequence with CTCN PAM
aacacuuacuuuaucaauuc

SEQ ID NO: 10943 - RNA, 20 nt, Artificial Sequence
  targeting sequence with CTCN PAM
uccuucagaacuaauaaaau

SEQ ID NO: 10944 - RNA, 20 nt, Artificial Sequence
  targeting sequence with CTCN PAM
uaacauugcuguaucugcuu

SEQ ID NO: 10945 - RNA, 20 nt, Artificial Sequence
  targeting sequence with CTCN PAM
uuacacauggcccacuauuu

SEQ ID NO: 10946 - RNA, 20 nt, Artificial Sequence
  targeting sequence with CTCN PAM
ugcucuuuacacauggccca

SEQ ID NO: 10947 - RNA, 20 nt, Artificial Sequence
  targeting sequence with CTCN PAM
ucaucgguuuuuaucuucag

SEQ ID NO: 10948 - RNA, 20 nt, Artificial Sequence
  targeting sequence with CTCN PAM
cgccuguaaucucugcacuu

SEQ ID NO: 10949 - RNA, 20 nt, Artificial Sequence
  targeting sequence with CTCN PAM
gccuuagaaacuuuacagac

SEQ ID NO: 10950 - RNA, 20 nt, Artificial Sequence
  targeting sequence with CTCN PAM
cuguugcuaaaaauauugga

SEQ ID NO: 10951 - RNA, 20 nt, Artificial Sequence
  targeting sequence with CTCN PAM
aauauuuuuagcaacaggga

SEQ ID NO: 10952 - RNA, 20 nt, Artificial Sequence
  targeting sequence with CTCN PAM
ggacauacuucccuguucaa

SEQ ID NO: 10953 - RNA, 20 nt, Artificial Sequence
  targeting sequence with CTCN PAM
uuaucuggauaugauuuugc

SEQ ID NO: 10954 - RNA, 20 nt, Artificial Sequence
  targeting sequence with CTCN PAM
gucacaacagauuaucaaaa

SEQ ID NO: 10955 - RNA, 20 nt, Artificial Sequence
  targeting sequence with CTCN PAM
ccugaguuucuucuuugucc

SEQ ID NO: 10956 - RNA, 20 nt, Artificial Sequence
  targeting sequence with CTCN PAM
ggugagaagugauauguuuu

SEQ ID NO: 10957 - RNA, 20 nt, Artificial Sequence
  targeting sequence with CTCN PAM
ccuuugccaugcaaggauaa

SEQ ID NO: 10958 - RNA, 20 nt, Artificial Sequence
  targeting sequence with CTCN PAM
uagacuaaauuaaagcaucc

SEQ ID NO: 10959 - RNA, 20 nt, Artificial Sequence
  targeting sequence with CTCN PAM
cuuagacuaaauuaaagcau

SEQ ID NO: 10960 - RNA, 20 nt, Artificial Sequence
  targeting sequence with CTCN PAM
uucauguuucccucucuuag

SEQ ID NO: 10961 - RNA, 20 nt, Artificial Sequence
  targeting sequence with CTCN PAM
caaaacaguuguuagaccgc

SEQ ID NO: 10962 - RNA, 20 nt, Artificial Sequence
  targeting sequence with CTCN PAM
aaacaguuguuagaccgcag

SEQ ID NO: 10963 - RNA, 20 nt, Artificial Sequence
  targeting sequence with CTCN PAM
acaaagaccaauauccauug

SEQ ID NO: 10964 - RNA, 20 nt, Artificial Sequence
  targeting sequence with CTCN PAM
ugucaauggauauuggucuu

SEQ ID NO: 10965 - RNA, 20 nt, Artificial Sequence
  targeting sequence with CTCN PAM
auucuucauaaacuugaggu

SEQ ID NO: 10966 - RNA, 20 nt, Artificial Sequence
  targeting sequence with CTCN PAM
aguuuaugaagaauagagau

SEQ ID NO: 10967 - RNA, 20 nt, Artificial Sequence
  targeting sequence with CTCN PAM
ucucucaccaucuacaaaag

SEQ ID NO: 10968 - RNA, 20 nt, Artificial Sequence
  targeting sequence with CTCN PAM
caccaucuacaaaagaagau

SEQ ID NO: 10969 - RNA, 20 nt, Artificial Sequence
  targeting sequence with CTCN PAM
ccaucuacaaaagaagauua

SEQ ID NO: 10970 - RNA, 20 nt, Artificial Sequence
  targeting sequence with CTCN PAM
aguuuugaacuuuuaaaaga

SEQ ID NO: 10971 - RNA, 20 nt, Artificial Sequence
  targeting sequence with CTCN PAM
uuuaaaaguucaaaacuuga

SEQ ID NO: 10972 - RNA, 20 nt, Artificial Sequence
  targeting sequence with CTCN PAM
ucuuuuaaaaguucaaaacu

SEQ ID NO: 10973 - RNA, 20 nt, Artificial Sequence
  targeting sequence with CTCN PAM
ccucuuuuaaaaguucaaaa

SEQ ID NO: 10974 - RNA, 20 nt, Artificial Sequence
  targeting sequence with CTCN PAM
cuccucuuuuaaaaguucaa

SEQ ID NO: 10975 - RNA, 20 nt, Artificial Sequence
  targeting sequence with CTCN PAM
guccagacuuuauacacuaa

SEQ ID NO: 10976 - RNA, 20 nt, Artificial Sequence
  targeting sequence with CTCN PAM
uuuuuuggauggaaaaacag

SEQ ID NO: 10977 - RNA, 20 nt, Artificial Sequence
  targeting sequence with CTCN PAM
aauauaccagguaagaacca

SEQ ID NO: 10978 - RNA, 20 nt, Artificial Sequence
  targeting sequence with CTCN PAM
acaaacaguccuuucuucuc

SEQ ID NO: 10979 - RNA, 20 nt, Artificial Sequence
  targeting sequence with CTCN PAM
ccuuuuuuaaccagcuuggu

SEQ ID NO: 10980 - RNA, 20 nt, Artificial Sequence
  targeting sequence with CTCN PAM
gccccauaggccgaacaaug

SEQ ID NO: 10981 - RNA, 20 nt, Artificial Sequence
  targeting sequence with CTCN PAM
gucauccccucggccccaua

SEQ ID NO: 10982 - RNA, 20 nt, Artificial Sequence
  targeting sequence with CTCN PAM
aucuucaccagaaauuucac

SEQ ID NO: 10983 - RNA, 20 nt, Artificial Sequence
  targeting sequence with CTCN PAM
uaggucagcuccaucuucac

SEQ ID NO: 10984 - RNA, 20 nt, Artificial Sequence
  targeting sequence with CTCN PAM
gucuaguauaaaguggcuau

SEQ ID NO: 10985 - RNA, 20 nt, Artificial Sequence
  targeting sequence with CTCN PAM
caacuaauuagaaaguauug

SEQ ID NO: 10986 - RNA, 20 nt, Artificial Sequence
  targeting sequence with CTCN PAM
uaugccacuuaaguaaaaau

SEQ ID NO: 10987 - RNA, 20 nt, Artificial Sequence
  targeting sequence with CTCN PAM
caauaauaugaaggaagaau

SEQ ID NO: 10988 - RNA, 20 nt, Artificial Sequence
  targeting sequence with CTCN PAM
aagauaaguuuauuucacug

SEQ ID NO: 10989 - RNA, 20 nt, Artificial Sequence
  targeting sequence with CTCN PAM
aagucguguaagaacaaagu

SEQ ID NO: 10990 - RNA, 20 nt, Artificial Sequence
  targeting sequence with CTCN PAM
caugaaaaaguaaacacuuu

SEQ ID NO: 10991 - RNA, 20 nt, Artificial Sequence
  targeting sequence with CTCN PAM
uccauguaauuugcugugug

SEQ ID NO: 10992 - RNA, 20 nt, Artificial Sequence
  targeting sequence with CTCN PAM
guaagugucucuuccaugua

SEQ ID NO: 10993 - RNA, 20 nt, Artificial Sequence
  targeting sequence with CTCN PAM
cuguaagugucucuuccaug

SEQ ID NO: 10994 - RNA, 20 nt, Artificial Sequence
  targeting sequence with CTCN PAM
cucuguaagugucucuucca

SEQ ID NO: 10995 - RNA, 20 nt, Artificial Sequence
  targeting sequence with CTCN PAM
gcuuccugccguacaacgcu

SEQ ID NO: 10996 - RNA, 20 nt, Artificial Sequence
  targeting sequence with CTCN PAM
acuuuucuuugguaauacug

SEQ ID NO: 10997 - RNA, 20 nt, Artificial Sequence
  targeting sequence with CTCN PAM
ccaguauuaccaaagaaaag

SEQ ID NO: 10998 - RNA, 20 nt, Artificial Sequence
  targeting sequence with CTCN PAM
aaagacacucacauuuuacu

SEQ ID NO: 10999 - RNA, 20 nt, Artificial Sequence
  targeting sequence with CTCN PAM
cacuuggaagugauauaggu

SEQ ID NO: 11000 - RNA, 20 nt, Artificial Sequence
  targeting sequence with CTCN PAM
cuuggaagugauauaggugg

SEQ ID NO: 11001 - RNA, 20 nt, Artificial Sequence
  targeting sequence with CTCN PAM
aauuagucacaccucuacau

SEQ ID NO: 11002 - RNA, 20 nt, Artificial Sequence
  targeting sequence with CTCN PAM
acauaagugaaaaggaaauc

SEQ ID NO: 11003 - RNA, 20 nt, Artificial Sequence
  targeting sequence with CTCN PAM
cugaugcucauuucauccuu

SEQ ID NO: 11004 - RNA, 20 nt, Artificial Sequence
  targeting sequence with CTCN PAM
gaugcucauuucauccuuuu

SEQ ID NO: 11005 - RNA, 20 nt, Artificial Sequence
  targeting sequence with CTCN PAM
uuucauccuuuuaacuuacu

SEQ ID NO: 11006 - RNA, 20 nt, Artificial Sequence
  targeting sequence with CTCN PAM
uccaaagcauucauacucca

SEQ ID NO: 11007 - RNA, 20 nt, Artificial Sequence
  targeting sequence with CTCN PAM
aaagcauucauacuccaggg

SEQ ID NO: 11008 - RNA, 20 nt, Artificial Sequence
  targeting sequence with CTCN PAM
agggucucgucauuuagguc

SEQ ID NO: 11009 - RNA, 20 nt, Artificial Sequence
  targeting sequence with CTCN PAM
ucauuuaggucaaauucuuc

SEQ ID NO: 11010 - RNA, 20 nt, Artificial Sequence
  targeting sequence with CTCN PAM
agaacccagagaucagacaa

SEQ ID NO: 11011 - RNA, 20 nt, Artificial Sequence
  targeting sequence with CTCN PAM
ggguucuagaggguguggaa

SEQ ID NO: 11012 - RNA, 20 nt, Artificial Sequence
  targeting sequence with CTCN PAM
ucauccuuagcauugaucuc

SEQ ID NO: 11013 - RNA, 20 nt, Artificial Sequence
  targeting sequence with CTCN PAM
uccuuagcauugaucucaau

SEQ ID NO: 11014 - RNA, 20 nt, Artificial Sequence
  targeting sequence with CTCN PAM
cuuucugcccuccccugcuc

SEQ ID NO: 11015 - RNA, 20 nt, Artificial Sequence
  targeting sequence with CTCN PAM
ggaaacucuuaccgccuguc

SEQ ID NO: 11016 - RNA, 20 nt, Artificial Sequence
  targeting sequence with CTCN PAM
uaccgccuguccuuaaugaa

SEQ ID NO: 11017 - RNA, 20 nt, Artificial Sequence
  targeting sequence with CTCN PAM
cagaaaacuaugaacuuguc

SEQ ID NO: 11018 - RNA, 20 nt, Artificial Sequence
  targeting sequence with CTCN PAM
accgcccugauccacacuuc

SEQ ID NO: 11019 - RNA, 20 nt, Artificial Sequence
  targeting sequence with CTCN PAM
ccaagauucuucuucugaag

SEQ ID NO: 11020 - RNA, 20 nt, Artificial Sequence
  targeting sequence with CTCN PAM
auguuuagcauccagggaaa

SEQ ID NO: 11021 - RNA, 20 nt, Artificial Sequence
  targeting sequence with CTCN PAM
auuaaauaugaugaacaaau

SEQ ID NO: 11022 - RNA, 20 nt, Artificial Sequence
  targeting sequence with CTCN PAM
uuaggugaauuaccaagacg

SEQ ID NO: 11023 - RNA, 20 nt, Artificial Sequence
  targeting sequence with CTCN PAM
aaagaaaaaaaaaaggaaaa

SEQ ID NO: 11024 - RNA, 20 nt, Artificial Sequence
  targeting sequence with CTCN PAM
uuuuccuuuuuuuuuucuuu

SEQ ID NO: 11025 - RNA, 20 nt, Artificial Sequence
  targeting sequence with CTCN PAM
auggagaaaauaaaacagca

SEQ ID NO: 11026 - RNA, 20 nt, Artificial Sequence
  targeting sequence with CTCN PAM
ucuaacaaauugguccaaag

SEQ ID NO: 11027 - RNA, 20 nt, Artificial Sequence
  targeting sequence with CTCN PAM
aacaaauugguccaaagaaa

SEQ ID NO: 11028 - RNA, 20 nt, Artificial Sequence
  targeting sequence with CTCN PAM
gacaagaagucacuccuaga

SEQ ID NO: 11029 - RNA, 20 nt, Artificial Sequence
  targeting sequence with CTCN PAM
uagauugagagccaugaaag

SEQ ID NO: 11030 - RNA, 20 nt, Artificial Sequence
  targeting sequence with CTCN PAM
aucuaggagugacuucuugu

SEQ ID NO: 11031 - RNA, 20 nt, Artificial Sequence
  targeting sequence with CTCN PAM
caaucuaggagugacuucuu

SEQ ID NO: 11032 - RNA, 20 nt, Artificial Sequence
  targeting sequence with CTCN PAM
uaucugauuaggaaauaaca

SEQ ID NO: 11033 - RNA, 20 nt, Artificial Sequence
  targeting sequence with CTCN PAM
ucaauuaucauaauaccuaa

SEQ ID NO: 11034 - RNA, 20 nt, Artificial Sequence
  targeting sequence with CTCN PAM
uucuggaaguagaaagcaaa

SEQ ID NO: 11035 - RNA, 20 nt, Artificial Sequence
  targeting sequence with CTCN PAM
cugucaacagaucuauaagu

SEQ ID NO: 11036 - RNA, 20 nt, Artificial Sequence
  targeting sequence with CTCN PAM
cccugucaacagaucuauaa

SEQ ID NO: 11037 - RNA, 20 nt, Artificial Sequence
  targeting sequence with CTCN PAM
cucccugucaacagaucuau

SEQ ID NO: 11038 - RNA, 20 nt, Artificial Sequence
  targeting sequence with CTCN PAM
uaacaaaugcaaaauuuaca

SEQ ID NO: 11039 - RNA, 20 nt, Artificial Sequence
  targeting sequence with CTCN PAM
ccugugaggacagucuuuac

SEQ ID NO: 11040 - RNA, 20 nt, Artificial Sequence
  targeting sequence with CTCN PAM
caggugagugaagauaucac

SEQ ID NO: 11041 - RNA, 20 nt, Artificial Sequence
  targeting sequence with CTCN PAM
gaucagaagaucuguaaaga

SEQ ID NO: 11042 - RNA, 20 nt, Artificial Sequence
  targeting sequence with CTCN PAM
ccccauuuucuguuggaaug

SEQ ID NO: 11043 - RNA, 20 nt, Artificial Sequence
  targeting sequence with CTCN PAM
ccauuuucuguuggaaugaa

SEQ ID NO: 11044 - RNA, 20 nt, Artificial Sequence
  targeting sequence with CTCN PAM
ugaacuuaugaguauacaga

SEQ ID NO: 11045 - RNA, 20 nt, Artificial Sequence
  targeting sequence with CTCN PAM
uaaguucaggaggcaucacu

SEQ ID NO: 11046 - RNA, 20 nt, Artificial Sequence
  targeting sequence with CTCN PAM
gccaaaaaguacaaaaauua

SEQ ID NO: 11047 - RNA, 20 nt, Artificial Sequence
  targeting sequence with CTCN PAM
ggaggcugaggugcaagaau

SEQ ID NO: 11048 - RNA, 20 nt, Artificial Sequence
  targeting sequence with CTCN PAM
cgaguagcugggaucacagg

SEQ ID NO: 11049 - RNA, 20 nt, Artificial Sequence
  targeting sequence with CTCN PAM
gccucccgaguagcugggau

SEQ ID NO: 11050 - RNA, 20 nt, Artificial Sequence
  targeting sequence with CTCN PAM
uguaccuggaagguagaggu

SEQ ID NO: 11051 - RNA, 20 nt, Artificial Sequence
  targeting sequence with CTCN PAM
aacucuaauuauaguaugag

SEQ ID NO: 11052 - RNA, 20 nt, Artificial Sequence
  targeting sequence with CTCN PAM
cucaaacucuaauuauagua

SEQ ID NO: 11053 - RNA, 20 nt, Artificial Sequence
  targeting sequence with CTCN PAM
aacucccucaaacucuaauu

SEQ ID NO: 11054 - RNA, 20 nt, Artificial Sequence
  targeting sequence with CTCN PAM
agguaguaaaaguuguacuu

SEQ ID NO: 11055 - RNA, 20 nt, Artificial Sequence
  targeting sequence with CTCN PAM
uugaucagauggaugaauac

SEQ ID NO: 11056 - RNA, 20 nt, Artificial Sequence
  targeting sequence with CTCN PAM
cacauaaaguucuuuauucc

SEQ ID NO: 11057 - RNA, 20 nt, Artificial Sequence
  targeting sequence with CTCN PAM
cauaaaguucuuuauuccac

SEQ ID NO: 11058 - RNA, 20 nt, Artificial Sequence
  targeting sequence with CTCN PAM
uucauguucccuuucuacca

SEQ ID NO: 11059 - RNA, 20 nt, Artificial Sequence
  targeting sequence with CTCN PAM
ucuuaauuauuuugaauauu

SEQ ID NO: 11060 - RNA, 20 nt, Artificial Sequence
  targeting sequence with CTCN PAM
acauucuaaugauuugaaac

SEQ ID NO: 11061 - RNA, 20 nt, Artificial Sequence
  targeting sequence with CTCN PAM
agaguuacugggugaaauac

SEQ ID NO: 11062 - RNA, 20 nt, Artificial Sequence
  targeting sequence with CTCN PAM
ugagauuuaaagauguuaaa

SEQ ID NO: 11063 - RNA, 20 nt, Artificial Sequence
  targeting sequence with CTCN PAM
gguacauaguacugcagcuu

SEQ ID NO: 11064 - RNA, 20 nt, Artificial Sequence
  targeting sequence with CTCN PAM
uuggacauuuaauggaaagc

SEQ ID NO: 11065 - RNA, 20 nt, Artificial Sequence
  targeting sequence with CTCN PAM
cuuuggacauuuaauggaaa

SEQ ID NO: 11066 - RNA, 20 nt, Artificial Sequence
  targeting sequence with CTCN PAM
acaggaaauaagcguagccc

SEQ ID NO: 11067 - RNA, 20 nt, Artificial Sequence
  targeting sequence with CTCN PAM
caaaaccacugaccauauua

SEQ ID NO: 11068 - RNA, 20 nt, Artificial Sequence
  targeting sequence with CTCN PAM
aaaccacugaccauauuauu

SEQ ID NO: 11069 - RNA, 20 nt, Artificial Sequence
  targeting sequence with CTCN PAM
ugguagacccuauauauuuc

SEQ ID NO: 11070 - RNA, 20 nt, Artificial Sequence
  targeting sequence with CTCN PAM
aaaguuguuuuuaaauuaua

SEQ ID NO: 11071 - RNA, 20 nt, Artificial Sequence
  targeting sequence with CTCN PAM
ugaaauguguaaagacaugu

SEQ ID NO: 11072 - RNA, 20 nt, Artificial Sequence
  targeting sequence with CTCN PAM
gggagcccagguugcauaua

SEQ ID NO: 11073 - RNA, 20 nt, Artificial Sequence
  targeting sequence with CTCN PAM
cugaggugauuucuuuuuuc

SEQ ID NO: 11074 - RNA, 20 nt, Artificial Sequence
  targeting sequence with CTCN PAM
gccccacaaacccugaacug

SEQ ID NO: 11075 - RNA, 20 nt, Artificial Sequence
  targeting sequence with CTCN PAM
uuuccaguaccuucccccag

SEQ ID NO: 11076 - RNA, 20 nt, Artificial Sequence
  targeting sequence with CTCN PAM
cuuuuccaguaccuuccccc

SEQ ID NO: 11077 - RNA, 20 nt, Artificial Sequence
  targeting sequence with CTCN PAM
gcuguuucuauuccucucuu

SEQ ID NO: 11078 - RNA, 20 nt, Artificial Sequence
  targeting sequence with CTCN PAM
ucugcuguuucuauuccucu

SEQ ID NO: 11079 - RNA, 20 nt, Artificial Sequence
  targeting sequence with CTCN PAM
gcagaugcugauauaauuau

SEQ ID NO: 11080 - RNA, 20 nt, Artificial Sequence
  targeting sequence with CTCN PAM
uauuguaauuccuuuuagag

SEQ ID NO: 11081 - RNA, 20 nt, Artificial Sequence
  targeting sequence with CTCN PAM
aaaaggaauuacaauaugag

SEQ ID NO: 11082 - RNA, 20 nt, Artificial Sequence
  targeting sequence with CTCN PAM
auuaugcugauauaauuuuu

SEQ ID NO: 11083 - RNA, 20 nt, Artificial Sequence
  targeting sequence with CTCN PAM
guaaaaaguagcauuccaac

SEQ ID NO: 11084 - RNA, 20 nt, Artificial Sequence
  targeting sequence with CTCN PAM
cccucuuuaauuaaaaggau

SEQ ID NO: 11085 - RNA, 20 nt, Artificial Sequence
  targeting sequence with CTCN PAM
cucuuuaauuaaaaggauac

SEQ ID NO: 11086 - RNA, 20 nt, Artificial Sequence
  targeting sequence with CTCN PAM
uuaauuaaaaggauacuauu

SEQ ID NO: 11087 - RNA, 20 nt, Artificial Sequence
  targeting sequence with CTCN PAM
aauauacugaauauauuaug

SEQ ID NO: 11088 - RNA, 20 nt, Artificial Sequence
  targeting sequence with CTCN PAM
uugguaagagcagggucagg

SEQ ID NO: 11089 - RNA, 20 nt, Artificial Sequence
  targeting sequence with CTCN PAM
uaccaaggaguuugauguag

SEQ ID NO: 11090 - RNA, 20 nt, Artificial Sequence
  targeting sequence with CTCN PAM
uuaaacuaaaucaacaguug

SEQ ID NO: 11091 - RNA, 20 nt, Artificial Sequence
  targeting sequence with CTCN PAM
ucuacuuucauuucaacugu

SEQ ID NO: 11092 - RNA, 20 nt, Artificial Sequence
  targeting sequence with CTCN PAM
aauuccucaaacauacuuaa

SEQ ID NO: 11093 - RNA, 20 nt, Artificial Sequence
  targeting sequence with CTCN PAM
aacauacuuaagucaggucu

SEQ ID NO: 11094 - RNA, 20 nt, Artificial Sequence
  targeting sequence with CTCN PAM
guaaugcaagguuagcauug

SEQ ID NO: 11095 - RNA, 20 nt, Artificial Sequence
  targeting sequence with CTCN PAM
uuucuguguauccuuccuaa

SEQ ID NO: 11096 - RNA, 20 nt, Artificial Sequence
  targeting sequence with CTCN PAM
gagugaaacacuuagggaau

SEQ ID NO: 11097 - RNA, 20 nt, Artificial Sequence
  targeting sequence with CTCN PAM
gagguuggcuauccucuuuu

SEQ ID NO: 11098 - RNA, 20 nt, Artificial Sequence
  targeting sequence with CTCN PAM
uaagcccccuuaaaugccuc

SEQ ID NO: 11099 - RNA, 20 nt, Artificial Sequence
  targeting sequence with CTCN PAM
gugccuggugucgugcuggu

SEQ ID NO: 11100 - RNA, 20 nt, Artificial Sequence
  targeting sequence with CTCN PAM
auggccauuguccucagugc

SEQ ID NO: 11101 - RNA, 20 nt, Artificial Sequence
  targeting sequence with CTCN PAM
cuauucuuuucuuacugucc

SEQ ID NO: 11102 - RNA, 20 nt, Artificial Sequence
  targeting sequence with CTCN PAM
uuucagaaguaaugcuauuu

SEQ ID NO: 11103 - RNA, 20 nt, Artificial Sequence
  targeting sequence with CTCN PAM
uucuuccuugaagguuuugg

SEQ ID NO: 11104 - RNA, 20 nt, Artificial Sequence
  targeting sequence with CTCN PAM
ccauuguacugaaugguguu

SEQ ID NO: 11105 - RNA, 20 nt, Artificial Sequence
  targeting sequence with CTCN PAM
uuagcaaaaucuguuuuagg

SEQ ID NO: 11106 - RNA, 20 nt, Artificial Sequence
  targeting sequence with CTCN PAM
acuuaaaguugccucauuag

SEQ ID NO: 11107 - RNA, 20 nt, Artificial Sequence
  targeting sequence with CTCN PAM
uaggauuccacaaaauacug

SEQ ID NO: 11108 - RNA, 20 nt, Artificial Sequence
  targeting sequence with CTCN PAM
auuaacucugguuuucauga

SEQ ID NO: 11109 - RNA, 20 nt, Artificial Sequence
  targeting sequence with CTCN PAM
ugaaaaccagaguuaauuga

SEQ ID NO: 11110 - RNA, 20 nt, Artificial Sequence
  targeting sequence with CTCN PAM
aaaucuaacuaacuuuguuc

SEQ ID NO: 11111 - RNA, 20 nt, Artificial Sequence
  targeting sequence with CTCN PAM
gccucuucuuccuaccucca

SEQ ID NO: 11112 - RNA, 20 nt, Artificial Sequence
  targeting sequence with CTCN PAM
ucuuccuaccuccaagagua

SEQ ID NO: 11113 - RNA, 20 nt, Artificial Sequence
  targeting sequence with CTCN PAM
uugagugguauuuauacucu

SEQ ID NO: 11114 - RNA, 20 nt, Artificial Sequence
  targeting sequence with CTCN PAM
uuguaauguugacccuccuu

SEQ ID NO: 11115 - RNA, 20 nt, Artificial Sequence
  targeting sequence with CTCN PAM
cagauggaagacaaacucca

SEQ ID NO: 11116 - RNA, 20 nt, Artificial Sequence
  targeting sequence with CTCN PAM
aaguuaacaaaaucuuuugg

SEQ ID NO: 11117 - RNA, 20 nt, Artificial Sequence
  targeting sequence with CTCN PAM
agcuggcagugccgccauca

SEQ ID NO: 11118 - RNA, 20 nt, Artificial Sequence
  targeting sequence with CTCN PAM
gaaaaggaagucaucuaaca

SEQ ID NO: 11119 - RNA, 20 nt, Artificial Sequence
  targeting sequence with CTCN PAM
uuaaaccauuguuagaugac

SEQ ID NO: 11120 - RNA, 20 nt, Artificial Sequence
  targeting sequence with CTCN PAM
auuccagguucaucacucau

SEQ ID NO: 11121 - RNA, 20 nt, Artificial Sequence
  targeting sequence with CTCN PAM
uuucacuguauuguaagccc

SEQ ID NO: 11122 - RNA, 20 nt, Artificial Sequence
  targeting sequence with CTCN PAM
cucugguuaagaaucacucu

SEQ ID NO: 11123 - RNA, 20 nt, Artificial Sequence
  targeting sequence with CTCN PAM
cugguuaagaaucacucuuu

SEQ ID NO: 11124 - RNA, 20 nt, Artificial Sequence
  targeting sequence with CTCN PAM
gguuaagaaucacucuuuuc

SEQ ID NO: 11125 - RNA, 20 nt, Artificial Sequence
  targeting sequence with CTCN PAM
uuucuauguauccccaguag

SEQ ID NO: 11126 - RNA, 20 nt, Artificial Sequence
  targeting sequence with CTCN PAM
uuuauaacacaaaccaagcu

SEQ ID NO: 11127 - RNA, 20 nt, Artificial Sequence
  targeting sequence with CTCN PAM
cuuuuauaacacaaaccaag

SEQ ID NO: 11128 - RNA, 20 nt, Artificial Sequence
  targeting sequence with CTCN PAM
cucuuuuauaacacaaacca

SEQ ID NO: 11129 - RNA, 20 nt, Artificial Sequence
  targeting sequence with CTCN PAM
uaggguacacauguaauuug

SEQ ID NO: 11130 - RNA, 20 nt, Artificial Sequence
  targeting sequence with CTCN PAM
uauguaccccaccacuggag

SEQ ID NO: 11131 - RNA, 20 nt, Artificial Sequence
  targeting sequence with CTCN PAM
aguggugggguacauaugag

SEQ ID NO: 11132 - RNA, 20 nt, Artificial Sequence
  targeting sequence with CTCN PAM
ucagaugagaaucacccuua

SEQ ID NO: 11133 - RNA, 20 nt, Artificial Sequence
  targeting sequence with CTCN PAM
ucugaagaggcagccccuaa

SEQ ID NO: 11134 - RNA, 20 nt, Artificial Sequence
  targeting sequence with CTCN PAM
guuauugccaguacugugug

SEQ ID NO: 11135 - RNA, 20 nt, Artificial Sequence
  targeting sequence with CTCN PAM
aucuuaucacauggcagauu

SEQ ID NO: 11136 - RNA, 20 nt, Artificial Sequence
  targeting sequence with CTCN PAM
guggggcagaaaaggaaaug

SEQ ID NO: 11137 - RNA, 20 nt, Artificial Sequence
  targeting sequence with CTCN PAM
ucaagacccuucuuucacuc

SEQ ID NO: 11138 - RNA, 20 nt, Artificial Sequence
  targeting sequence with CTCN PAM
cauucagcuguacgauuagg

SEQ ID NO: 11139 - RNA, 20 nt, Artificial Sequence
  targeting sequence with CTCN PAM
ucuucaagcaucguagcugg

SEQ ID NO: 11140 - RNA, 20 nt, Artificial Sequence
  targeting sequence with CTCN PAM
auuucugaagcuaagaagga

SEQ ID NO: 11141 - RNA, 20 nt, Artificial Sequence
  targeting sequence with CTCN PAM
ccuggccuuaaugauaguuu

SEQ ID NO: 11142 - RNA, 20 nt, Artificial Sequence
  targeting sequence with CTCN PAM
caucuguaaucccagcacuu

SEQ ID NO: 11143 - RNA, 20 nt, Artificial Sequence
  targeting sequence with CTCN PAM
caaagugcugggauuacaga

SEQ ID NO: 11144 - RNA, 20 nt, Artificial Sequence
  targeting sequence with CTCN PAM
gccucccaaagugcugggau

SEQ ID NO: 11145 - RNA, 20 nt, Artificial Sequence
  targeting sequence with CTCN PAM
ugauccgcccaccucagccu

SEQ ID NO: 11146 - RNA, 20 nt, Artificial Sequence
  targeting sequence with CTCN PAM
ugccucagccucccgaguag

SEQ ID NO: 11147 - RNA, 20 nt, Artificial Sequence
  targeting sequence with CTCN PAM
gcuuccuggguucaagcaau

SEQ ID NO: 11148 - RNA, 20 nt, Artificial Sequence
  targeting sequence with CTCN PAM
cugcaaccucugcuuccugg

SEQ ID NO: 11149 - RNA, 20 nt, Artificial Sequence
  targeting sequence with CTCN PAM
gcucacugcaaccucugcuu

SEQ ID NO: 11150 - RNA, 20 nt, Artificial Sequence
  targeting sequence with CTCN PAM
agacugggcaaaagagcaag

SEQ ID NO: 11151 - RNA, 20 nt, Artificial Sequence
  targeting sequence with CTCN PAM
uguuuuugacagacacuuac

SEQ ID NO: 11152 - RNA, 20 nt, Artificial Sequence
  targeting sequence with CTCN PAM
uucccagcaccuaagucuaa

SEQ ID NO: 11153 - RNA, 20 nt, Artificial Sequence
  targeting sequence with CTCN PAM
aaagaagcaaaucucuuucc

SEQ ID NO: 11154 - RNA, 20 nt, Artificial Sequence
  targeting sequence with CTCN PAM
gaauuaauuucugagguucc

SEQ ID NO: 11155 - RNA, 20 nt, Artificial Sequence
  targeting sequence with CTCN PAM
uggucuugacguucuuuacc

SEQ ID NO: 11156 - RNA, 20 nt, Artificial Sequence
  targeting sequence with CTCN PAM
ucacaaagaauuugcuucag

SEQ ID NO: 11157 - RNA, 20 nt, Artificial Sequence
  targeting sequence with CTCN PAM
gcucuucacaaagaauuugc

SEQ ID NO: 11158 - RNA, 20 nt, Artificial Sequence
  targeting sequence with CTCN PAM
ugaucugaacuaaaauuuac

SEQ ID NO: 11159 - RNA, 20 nt, Artificial Sequence
  targeting sequence with CTCN PAM
guguaaauuuuaguucagau

SEQ ID NO: 11160 - RNA, 20 nt, Artificial Sequence
  targeting sequence with CTCN PAM
uauuuuaauuacacugauac

SEQ ID NO: 11161 - RNA, 20 nt, Artificial Sequence
  targeting sequence with CTCN PAM
auucauuaaugacugguuau

SEQ ID NO: 11162 - RNA, 20 nt, Artificial Sequence
  targeting sequence with CTCN PAM
ccccuacauauuagucauuu

SEQ ID NO: 11163 - RNA, 20 nt, Artificial Sequence
  targeting sequence with CTCN PAM
ccuacauauuagucauuuac

SEQ ID NO: 11164 - RNA, 20 nt, Artificial Sequence
  targeting sequence with CTCN PAM
aaucaaaauacuccauacac

SEQ ID NO: 11165 - RNA, 20 nt, Artificial Sequence
  targeting sequence with CTCN PAM
auacacugagauaacagucu

SEQ ID NO: 11166 - RNA, 20 nt, Artificial Sequence
  targeting sequence with CTCN PAM
guguauggaguauuuugauu

SEQ ID NO: 11167 - RNA, 20 nt, Artificial Sequence
  targeting sequence with CTCN PAM
uauuaguaacugaaaccuuu

SEQ ID NO: 11168 - RNA, 20 nt, Artificial Sequence
  targeting sequence with CTCN PAM
cuuguuuuaugaauuuguuc

SEQ ID NO: 11169 - RNA, 20 nt, Artificial Sequence
  targeting sequence with CTCN PAM
aauuccauauuuuagcaaga

SEQ ID NO: 11170 - RNA, 20 nt, Artificial Sequence
  targeting sequence with CTCN PAM
uuacaccguuauuucuguua

SEQ ID NO: 11171 - RNA, 20 nt, Artificial Sequence
  targeting sequence with CTCN PAM
cuuuacaccguuauuucugu

SEQ ID NO: 11172 - RNA, 20 nt, Artificial Sequence
  targeting sequence with CTCN PAM
uuaggccagucugaggauua

SEQ ID NO: 11173 - RNA, 20 nt, Artificial Sequence
  targeting sequence with CTCN PAM
gacuggccuaaugaguuugg

SEQ ID NO: 11174 - RNA, 20 nt, Artificial Sequence
  targeting sequence with CTCN PAM
guauauuagaaagugcauga

SEQ ID NO: 11175 - RNA, 20 nt, Artificial Sequence
  targeting sequence with CTCN PAM
guuuuagauauaauauguau

SEQ ID NO: 11176 - RNA, 20 nt, Artificial Sequence
  targeting sequence with CTCN PAM
gguuucuuugauccauucuu

SEQ ID NO: 11177 - RNA, 20 nt, Artificial Sequence
  targeting sequence with CTCN PAM
uaacacuucuuuugauauuu

SEQ ID NO: 11178 - RNA, 20 nt, Artificial Sequence
  targeting sequence with CTCN PAM
ucgauucacugauuuuuuga

SEQ ID NO: 11179 - RNA, 20 nt, Artificial Sequence
  targeting sequence with CTCN PAM
auucacugauuuuuugaagg

SEQ ID NO: 11180 - RNA, 20 nt, Artificial Sequence
  targeting sequence with CTCN PAM
aucuucuucaguucugcucu

SEQ ID NO: 11181 - RNA, 20 nt, Artificial Sequence
  targeting sequence with CTCN PAM
gaucuuaguuauuuuuugcc

SEQ ID NO: 11182 - RNA, 20 nt, Artificial Sequence
  targeting sequence with CTCN PAM
ugcuucucuaguucuuuuaa

SEQ ID NO: 11183 - RNA, 20 nt, Artificial Sequence
  targeting sequence with CTCN PAM
aguucuuuuaauugugaugu

SEQ ID NO: 11184 - RNA, 20 nt, Artificial Sequence
  targeting sequence with CTCN PAM
ugugggcauuuagugcuaua

SEQ ID NO: 11185 - RNA, 20 nt, Artificial Sequence
  targeting sequence with CTCN PAM
aaacauugcuuuagcugugu

SEQ ID NO: 11186 - RNA, 20 nt, Artificial Sequence
  targeting sequence with CTCN PAM
gggacacagcuaaagcaaug

SEQ ID NO: 11187 - RNA, 20 nt, Artificial Sequence
  targeting sequence with CTCN PAM
uugguuucaaauaacuuauu

SEQ ID NO: 11188 - RNA, 20 nt, Artificial Sequence
  targeting sequence with CTCN PAM
ugaaugacuacuggguaaau

SEQ ID NO: 11189 - RNA, 20 nt, Artificial Sequence
  targeting sequence with CTCN PAM
aaaucgcacaacuacaugga

SEQ ID NO: 11190 - RNA, 20 nt, Artificial Sequence
  targeting sequence with CTCN PAM
aaaauugaccacauaauugg

SEQ ID NO: 11191 - RNA, 20 nt, Artificial Sequence
  targeting sequence with CTCN PAM
accccaaaucaacagaauau

SEQ ID NO: 11192 - RNA, 20 nt, Artificial Sequence
  targeting sequence with CTCN PAM
ccaccccaaaucaacagaau

SEQ ID NO: 11193 - RNA, 20 nt, Artificial Sequence
  targeting sequence with CTCN PAM
ggaccaagcagaccuaauag

SEQ ID NO: 11194 - RNA, 20 nt, Artificial Sequence
  targeting sequence with CTCN PAM
gcucuggaccaagcagaccu

SEQ ID NO: 11195 - RNA, 20 nt, Artificial Sequence
  targeting sequence with CTCN PAM
caagacuaaaccaagaagaa

SEQ ID NO: 11196 - RNA, 20 nt, Artificial Sequence
  targeting sequence with CTCN PAM
auuucagaacuuguuauugg

SEQ ID NO: 11197 - RNA, 20 nt, Artificial Sequence
  targeting sequence with CTCN PAM
gguagaauucagcugugaau

SEQ ID NO: 11198 - RNA, 20 nt, Artificial Sequence
  targeting sequence with CTCN PAM
uuguaccucugguagaauuc

SEQ ID NO: 11199 - RNA, 20 nt, Artificial Sequence
  targeting sequence with CTCN PAM
ucuuuguaccucugguagaa

SEQ ID NO: 11200 - RNA, 20 nt, Artificial Sequence
  targeting sequence with CTCN PAM
uuuucuguugcuuggaauag

SEQ ID NO: 11201 - RNA, 20 nt, Artificial Sequence
  targeting sequence with CTCN PAM
cuaacucauuuuaugaggac

SEQ ID NO: 11202 - RNA, 20 nt, Artificial Sequence
  targeting sequence with CTCN PAM
uuuuaugaggacagcaucuu

SEQ ID NO: 11203 - RNA, 20 nt, Artificial Sequence
  targeting sequence with CTCN PAM
cucaucacucuuauuuaaca

SEQ ID NO: 11204 - RNA, 20 nt, Artificial Sequence
  targeting sequence with CTCN PAM
caucacucuuauuuaacaua

SEQ ID NO: 11205 - RNA, 20 nt, Artificial Sequence
  targeting sequence with CTCN PAM
ucacucuuauuuaacauagu

SEQ ID NO: 11206 - RNA, 20 nt, Artificial Sequence
  targeting sequence with CTCN PAM
uauuuaacauaguauuggaa

SEQ ID NO: 11207 - RNA, 20 nt, Artificial Sequence
  targeting sequence with CTCN PAM
ugccugauugcccuggccag

SEQ ID NO: 11208 - RNA, 20 nt, Artificial Sequence
  targeting sequence with CTCN PAM
guuugcagaugacaugauug

SEQ ID NO: 11209 - RNA, 20 nt, Artificial Sequence
  targeting sequence with CTCN PAM
caggccaaaaucuccuuaag

SEQ ID NO: 11210 - RNA, 20 nt, Artificial Sequence
  targeting sequence with CTCN PAM
ggccaaaaucuccuuaagca

SEQ ID NO: 11211 - RNA, 20 nt, Artificial Sequence
  targeting sequence with CTCN PAM
uuaagcaacuucagcaaagu

SEQ ID NO: 11212 - RNA, 20 nt, Artificial Sequence
  targeting sequence with CTCN PAM
ggauacaaaaucaaugugca

SEQ ID NO: 11213 - RNA, 20 nt, Artificial Sequence
  targeting sequence with CTCN PAM
ugauuugucuauuauucgug

SEQ ID NO: 11214 - RNA, 20 nt, Artificial Sequence
  targeting sequence with CTCN PAM
cauucacaauuacuacaaag

SEQ ID NO: 11215 - RNA, 20 nt, Artificial Sequence
  targeting sequence with CTCN PAM
uuguaguaauugugaauggg

SEQ ID NO: 11216 - RNA, 20 nt, Artificial Sequence
  targeting sequence with CTCN PAM
acaugccuuguaaguuguau

SEQ ID NO: 11217 - RNA, 20 nt, Artificial Sequence
  targeting sequence with CTCN PAM
uugaagaaguccuccacaug

SEQ ID NO: 11218 - RNA, 20 nt, Artificial Sequence
  targeting sequence with CTCN PAM
aggaaauaagagaggacaca

SEQ ID NO: 11219 - RNA, 20 nt, Artificial Sequence
  targeting sequence with CTCN PAM
uauuuccuugagcagugguu

SEQ ID NO: 11220 - RNA, 20 nt, Artificial Sequence
  targeting sequence with CTCN PAM
cuuauuuccuugagcagugg

SEQ ID NO: 11221 - RNA, 20 nt, Artificial Sequence
  targeting sequence with CTCN PAM
ugcccaggaagaaucaaugu

SEQ ID NO: 11222 - RNA, 20 nt, Artificial Sequence
  targeting sequence with CTCN PAM
aauucugugaagaaagucag

SEQ ID NO: 11223 - RNA, 20 nt, Artificial Sequence
  targeting sequence with CTCN PAM
agcuuuguucuuuuugcuua

SEQ ID NO: 11224 - RNA, 20 nt, Artificial Sequence
  targeting sequence with CTCN PAM
aaucuuuguuauuucuuucc

SEQ ID NO: 11225 - RNA, 20 nt, Artificial Sequence
  targeting sequence with CTCN PAM
uugaaugaaaagaugaacaa

SEQ ID NO: 11226 - RNA, 20 nt, Artificial Sequence
  targeting sequence with CTCN PAM
cuuuuuuguguuagucuacc

SEQ ID NO: 11227 - RNA, 20 nt, Artificial Sequence
  targeting sequence with CTCN PAM
gaaaugaaaguggguacaua

SEQ ID NO: 11228 - RNA, 20 nt, Artificial Sequence
  targeting sequence with CTCN PAM
caacaaagaaaagcccugga

SEQ ID NO: 11229 - RNA, 20 nt, Artificial Sequence
  targeting sequence with CTCN PAM
ggcugaaaccuucaauacua

SEQ ID NO: 11230 - RNA, 20 nt, Artificial Sequence
  targeting sequence with CTCN PAM
cuuuucaauuuggaugucuu

SEQ ID NO: 11231 - RNA, 20 nt, Artificial Sequence
  targeting sequence with CTCN PAM
ugccucagccucccgaguag

SEQ ID NO: 11232 - RNA, 20 nt, Artificial Sequence
  targeting sequence with CTCN PAM
gcuucccggcuucccggguu

SEQ ID NO: 11233 - RNA, 20 nt, Artificial Sequence
  targeting sequence with CTCN PAM
cugcaagcuccgcuucccgg

SEQ ID NO: 11234 - RNA, 20 nt, Artificial Sequence
  targeting sequence with CTCN PAM
gcucacugcaagcuccgcuu

SEQ ID NO: 11235 - RNA, 20 nt, Artificial Sequence
  targeting sequence with CTCN PAM
gucgcccaggccggacugcg

SEQ ID NO: 11236 - RNA, 20 nt, Artificial Sequence
  targeting sequence with CTCN PAM
cucugucgcccaggccggac

SEQ ID NO: 11237 - RNA, 20 nt, Artificial Sequence
  targeting sequence with CTCN PAM
gucucaaaaaaaaaaaaaaa

SEQ ID NO: 11238 - RNA, 20 nt, Artificial Sequence
  targeting sequence with CTCN PAM
aaaaaaaaaaaaaaaaaaaa

SEQ ID NO: 11239 - RNA, 20 nt, Artificial Sequence
  targeting sequence with CTCN PAM
uuaguuaccuguguuuuuug

SEQ ID NO: 11240 - RNA, 20 nt, Artificial Sequence
  targeting sequence with CTCN PAM
aagucaaaagucaaucacca

SEQ ID NO: 11241 - RNA, 20 nt, Artificial Sequence
  targeting sequence with CTCN PAM
guauaagguuagcuuuucca

SEQ ID NO: 11242 - RNA, 20 nt, Artificial Sequence
  targeting sequence with CTCN PAM
gauugacuccucucauaaua

SEQ ID NO: 11243 - RNA, 20 nt, Artificial Sequence
  targeting sequence with CTCN PAM
ucucauaauacuaguuggag

SEQ ID NO: 11244 - RNA, 20 nt, Artificial Sequence
  targeting sequence with CTCN PAM
cauaauacuaguuggagacc

SEQ ID NO: 11245 - RNA, 20 nt, Artificial Sequence
  targeting sequence with CTCN PAM
uaauacuaguuggagaccag

SEQ ID NO: 11246 - RNA, 20 nt, Artificial Sequence
  targeting sequence with CTCN PAM
aacuaguauuaugagaggag

SEQ ID NO: 11247 - RNA, 20 nt, Artificial Sequence
  targeting sequence with CTCN PAM
ggucuccaacuaguauuaug

SEQ ID NO: 11248 - RNA, 20 nt, Artificial Sequence
  targeting sequence with CTCN PAM
cuggucuccaacuaguauua

SEQ ID NO: 11249 - RNA, 20 nt, Artificial Sequence
  targeting sequence with CTCN PAM
gcugccucucuggucuccaa

SEQ ID NO: 11250 - RNA, 20 nt, Artificial Sequence
  targeting sequence with CTCN PAM
cggcucagcugccucucugg

SEQ ID NO: 11251 - RNA, 20 nt, Artificial Sequence
  targeting sequence with CTCN PAM
uagucagacagacacaucag

SEQ ID NO: 11252 - RNA, 20 nt, Artificial Sequence
  targeting sequence with CTCN PAM
acauguugauucaugucugu

SEQ ID NO: 11253 - RNA, 20 nt, Artificial Sequence
  targeting sequence with CTCN PAM
uuugguccuguuguuuugug

SEQ ID NO: 11254 - RNA, 20 nt, Artificial Sequence
  targeting sequence with CTCN PAM
gcacuuggugauccgagcag

SEQ ID NO: 11255 - RNA, 20 nt, Artificial Sequence
  targeting sequence with CTCN PAM
gaucaccaagugcugaggua

SEQ ID NO: 11256 - RNA, 20 nt, Artificial Sequence
  targeting sequence with CTCN PAM
guucaccaagcaaaagccaa

SEQ ID NO: 11257 - RNA, 20 nt, Artificial Sequence
  targeting sequence with CTCN PAM
gcaaccaggguggaccuucu

SEQ ID NO: 11258 - RNA, 20 nt, Artificial Sequence
  targeting sequence with CTCN PAM
acucagcaaccaggguggac

SEQ ID NO: 11259 - RNA, 20 nt, Artificial Sequence
  targeting sequence with CTCN PAM
ucuucuugcuucugccuugc

SEQ ID NO: 11260 - RNA, 20 nt, Artificial Sequence
  targeting sequence with CTCN PAM
ugcuauaguccaaguaggaa

SEQ ID NO: 11261 - RNA, 20 nt, Artificial Sequence
  targeting sequence with CTCN PAM
uucagggaaaggccaaguuu

SEQ ID NO: 11262 - RNA, 20 nt, Artificial Sequence
  targeting sequence with CTCN PAM
agcauacccaguugcuggcu

SEQ ID NO: 11263 - RNA, 20 nt, Artificial Sequence
  targeting sequence with CTCN PAM
gaagcuguaggcacguaaca

SEQ ID NO: 11264 - RNA, 20 nt, Artificial Sequence
  targeting sequence with CTCN PAM
ucuuguuacgugccuacagc

SEQ ID NO: 11265 - RNA, 20 nt, Artificial Sequence
  targeting sequence with CTCN PAM
cccgcaaucagcgagucuuu

SEQ ID NO: 11266 - RNA, 20 nt, Artificial Sequence
  targeting sequence with CTCN PAM
cgcaaucagcgagucuuugg

SEQ ID NO: 11267 - RNA, 20 nt, Artificial Sequence
  targeting sequence with CTCN PAM
cugauugcgggagaggcuuu

SEQ ID NO: 11268 - RNA, 20 nt, Artificial Sequence
  targeting sequence with CTCN PAM
uucacuuccagagcugcaau

SEQ ID NO: 11269 - RNA, 20 nt, Artificial Sequence
  targeting sequence with CTCN PAM
ggaagugaaggagaaccagu

SEQ ID NO: 11270 - RNA, 20 nt, Artificial Sequence
  targeting sequence with CTCN PAM
auaauaaaggaaguuuuuaa

SEQ ID NO: 11271 - RNA, 20 nt, Artificial Sequence
  targeting sequence with CTCN PAM
auuuuagaaauaccucaaua

SEQ ID NO: 11272 - RNA, 20 nt, Artificial Sequence
  targeting sequence with CTCN PAM
aucucuauuuuagaaauacc

SEQ ID NO: 11273 - RNA, 20 nt, Artificial Sequence
  targeting sequence with CTCN PAM
uuaaaauauagcuuuauuuc

SEQ ID NO: 11274 - RNA, 20 nt, Artificial Sequence
  targeting sequence with CTCN PAM
gcuaagcuaaaaacuguuga

SEQ ID NO: 11275 - RNA, 20 nt, Artificial Sequence
  targeting sequence with CTCN PAM
guauacacuuaguauuuaug

SEQ ID NO: 11276 - RNA, 20 nt, Artificial Sequence
  targeting sequence with CTCN PAM
ugcucacaagcaagagaaga

SEQ ID NO: 11277 - RNA, 20 nt, Artificial Sequence
  targeting sequence with CTCN PAM
caagcaagagaagagggucu

SEQ ID NO: 11278 - RNA, 20 nt, Artificial Sequence
  targeting sequence with CTCN PAM
ugcuugugagcaugaguaaa

SEQ ID NO: 11279 - RNA, 20 nt, Artificial Sequence
  targeting sequence with CTCN PAM
ucucuugcuugugagcauga

SEQ ID NO: 11280 - RNA, 20 nt, Artificial Sequence
  targeting sequence with CTCN PAM
cauuuuugugacucuggcaa

SEQ ID NO: 11281 - RNA, 20 nt, Artificial Sequence
  targeting sequence with CTCN PAM
ggcaaaccuacacacagaau

SEQ ID NO: 11282 - RNA, 20 nt, Artificial Sequence
  targeting sequence with CTCN PAM
uuacugucucuuuuuaauca

SEQ ID NO: 11283 - RNA, 20 nt, Artificial Sequence
  targeting sequence with CTCN PAM
uuuuaaucaguaccugaacu

SEQ ID NO: 11284 - RNA, 20 nt, Artificial Sequence
  targeting sequence with CTCN PAM
gcaguucagguacugauuaa

SEQ ID NO: 11285 - RNA, 20 nt, Artificial Sequence
  targeting sequence with CTCN PAM
caacaagaucaagccguccu

SEQ ID NO: 11286 - RNA, 20 nt, Artificial Sequence
  targeting sequence with CTCN PAM
ugaagcaagccacaguagaa

SEQ ID NO: 11287 - RNA, 20 nt, Artificial Sequence
  targeting sequence with CTCN PAM
uaauacuuguuccauucuuu

SEQ ID NO: 11288 - RNA, 20 nt, Artificial Sequence
  targeting sequence with CTCN PAM
uucucauaauacuuguucca

SEQ ID NO: 11289 - RNA, 20 nt, Artificial Sequence
  targeting sequence with CTCN PAM
uauucagaauguccuguuua

SEQ ID NO: 11290 - RNA, 20 nt, Artificial Sequence
  targeting sequence with CTCN PAM
agcagcagggaugauuuccu

SEQ ID NO: 11291 - RNA, 20 nt, Artificial Sequence
  targeting sequence with CTCN PAM
aguugcaauacaaguaagug

SEQ ID NO: 11292 - RNA, 20 nt, Artificial Sequence
  targeting sequence with CTCN PAM
acccuaauagaagaccuauc

SEQ ID NO: 11293 - RNA, 20 nt, Artificial Sequence
  targeting sequence with CTCN PAM
ccaaagaugguauagaagca

SEQ ID NO: 11294 - RNA, 20 nt, Artificial Sequence
  targeting sequence with CTCN PAM
gaauaagucuagcuguuucu

SEQ ID NO: 11295 - RNA, 20 nt, Artificial Sequence
  targeting sequence with CTCN PAM
aucccaucagaaguagacua

SEQ ID NO: 11296 - RNA, 20 nt, Artificial Sequence
  targeting sequence with CTCN PAM
cugcaugacauuuacaacca

SEQ ID NO: 11297 - RNA, 20 nt, Artificial Sequence
  targeting sequence with CTCN PAM
gcaugacauuuacaaccaaa

SEQ ID NO: 11298 - RNA, 20 nt, Artificial Sequence
  targeting sequence with CTCN PAM
gcuguuuuucagcauaggaa

SEQ ID NO: 11299 - RNA, 20 nt, Artificial Sequence
  targeting sequence with CTCN PAM
cucccuuaucuccuucaggu

SEQ ID NO: 11300 - RNA, 20 nt, Artificial Sequence
  targeting sequence with CTCN PAM
cuuaucuccuucaggucuuu

SEQ ID NO: 11301 - RNA, 20 nt, Artificial Sequence
  targeting sequence with CTCN PAM
uucaggucuuugcuagaugu

SEQ ID NO: 11302 - RNA, 20 nt, Artificial Sequence
  targeting sequence with CTCN PAM
gccauuuacagggcugucaa

SEQ ID NO: 11303 - RNA, 20 nt, Artificial Sequence
  targeting sequence with CTCN PAM
uuucacaucacucagccauu

SEQ ID NO: 11304 - RNA, 20 nt, Artificial Sequence
  targeting sequence with CTCN PAM
acaguguggaacacagaaua

SEQ ID NO: 11305 - RNA, 20 nt, Artificial Sequence
  targeting sequence with CTCN PAM
gugccagaccuccccucagg

SEQ ID NO: 11306 - RNA, 20 nt, Artificial Sequence
  targeting sequence with CTCN PAM
ccucaggaauuccuucaacc

SEQ ID NO: 11307 - RNA, 20 nt, Artificial Sequence
  targeting sequence with CTCN PAM
ggaauuccuucaaccauccu

SEQ ID NO: 11308 - RNA, 20 nt, Artificial Sequence
  targeting sequence with CTCN PAM
gcucaugcuuugagcuggug

SEQ ID NO: 11309 - RNA, 20 nt, Artificial Sequence
  targeting sequence with CTCN PAM
ugcuuugagcugguguccau

SEQ ID NO: 11310 - RNA, 20 nt, Artificial Sequence
  targeting sequence with CTCN PAM
aagcaugagcagaggauggu

SEQ ID NO: 11311 - RNA, 20 nt, Artificial Sequence
  targeting sequence with CTCN PAM
guugccugguguucaagcaa

SEQ ID NO: 11312 - RNA, 20 nt, Artificial Sequence
  targeting sequence with CTCN PAM
cacucacccuuccuuccauu

SEQ ID NO: 11313 - RNA, 20 nt, Artificial Sequence
  targeting sequence with CTCN PAM
cucacccuuccuuccauucc

SEQ ID NO: 11314 - RNA, 20 nt, Artificial Sequence
  targeting sequence with CTCN PAM
cccuuccuuccauuccagcu

SEQ ID NO: 11315 - RNA, 20 nt, Artificial Sequence
  targeting sequence with CTCN PAM
caaaggcagagauaauaucu

SEQ ID NO: 11316 - RNA, 20 nt, Artificial Sequence
  targeting sequence with CTCN PAM
aaggcagagauaauaucuaa

SEQ ID NO: 11317 - RNA, 20 nt, Artificial Sequence
  targeting sequence with CTCN PAM
gccuuugagaggcagcugau

SEQ ID NO: 11318 - RNA, 20 nt, Artificial Sequence
  targeting sequence with CTCN PAM
ugucaguuugaaauaaggug

SEQ ID NO: 11319 - RNA, 20 nt, Artificial Sequence
  targeting sequence with CTCN PAM
uggcuucuacucuucuugaa

SEQ ID NO: 11320 - RNA, 20 nt, Artificial Sequence
  targeting sequence with CTCN PAM
ucuugaaaauuucccccacu

SEQ ID NO: 11321 - RNA, 20 nt, Artificial Sequence
  targeting sequence with CTCN PAM
uguaacauuacauugaaacu

SEQ ID NO: 11322 - RNA, 20 nt, Artificial Sequence
  targeting sequence with CTCN PAM
aaccucaaaccgccagcuuu

SEQ ID NO: 11323 - RNA, 20 nt, Artificial Sequence
  targeting sequence with CTCN PAM
aaccgccagcuuugaggaag

SEQ ID NO: 11324 - RNA, 20 nt, Artificial Sequence
  targeting sequence with CTCN PAM
aagcuggcgguuugagguua

SEQ ID NO: 11325 - RNA, 20 nt, Artificial Sequence
  targeting sequence with CTCN PAM
ugccaacagcugaugaugac

SEQ ID NO: 11326 - RNA, 20 nt, Artificial Sequence
  targeting sequence with CTCN PAM
aaacucaugccaacagcuga

SEQ ID NO: 11327 - RNA, 20 nt, Artificial Sequence
  targeting sequence with CTCN PAM
agaacggaaagauuuuucuu

SEQ ID NO: 11328 - RNA, 20 nt, Artificial Sequence
  targeting sequence with CTCN PAM
ucuugcauuuuuaauauaug

SEQ ID NO: 11329 - RNA, 20 nt, Artificial Sequence
  targeting sequence with CTCN PAM
guaaacaacugcuuauuaag

SEQ ID NO: 11330 - RNA, 20 nt, Artificial Sequence
  targeting sequence with CTCN PAM
cauugccucagucuuaaacu

SEQ ID NO: 11331 - RNA, 20 nt, Artificial Sequence
  targeting sequence with CTCN PAM
uugccucagucuuaaacuag

SEQ ID NO: 11332 - RNA, 20 nt, Artificial Sequence
  targeting sequence with CTCN PAM
gucuuaaacuagauguaguu

SEQ ID NO: 11333 - RNA, 20 nt, Artificial Sequence
  targeting sequence with CTCN PAM
caaaagcuuuuauuuugcug

SEQ ID NO: 11334 - RNA, 20 nt, Artificial Sequence
  targeting sequence with CTCN PAM
gaagucuuaaaaugauacca

SEQ ID NO: 11335 - RNA, 20 nt, Artificial Sequence
  targeting sequence with CTCN PAM
uggucugaagaaaauaaagc

SEQ ID NO: 11336 - RNA, 20 nt, Artificial Sequence
  targeting sequence with CTCN PAM
acaacuuagaaguaagaaac

SEQ ID NO: 11337 - RNA, 20 nt, Artificial Sequence
  targeting sequence with CTCN PAM
gaagguagacauucccgggg

SEQ ID NO: 11338 - RNA, 20 nt, Artificial Sequence
  targeting sequence with CTCN PAM
aucccugucaucaaagcaac

SEQ ID NO: 11339 - RNA, 20 nt, Artificial Sequence
  targeting sequence with CTCN PAM
aaaucuccaucccugucauc

SEQ ID NO: 11340 - RNA, 20 nt, Artificial Sequence
  targeting sequence with CTCN PAM
guccucaaaaucuccauccc

SEQ ID NO: 11341 - RNA, 20 nt, Artificial Sequence
  targeting sequence with CTCN PAM
uaaacuuagaaaacauugcu

SEQ ID NO: 11342 - RNA, 20 nt, Artificial Sequence
  targeting sequence with CTCN PAM
uucucuuaaacuuagaaaac

SEQ ID NO: 11343 - RNA, 20 nt, Artificial Sequence
  targeting sequence with CTCN PAM
uuaauauaagccacaccaau

SEQ ID NO: 11344 - RNA, 20 nt, Artificial Sequence
  targeting sequence with CTCN PAM
aaauacugauaauaaaauua

SEQ ID NO: 11345 - RNA, 20 nt, Artificial Sequence
  targeting sequence with CTCN PAM
gaauaaauugauguagaaaa

SEQ ID NO: 11346 - RNA, 20 nt, Artificial Sequence
  targeting sequence with CTCN PAM
gacauacgcaaugaucagau

SEQ ID NO: 11347 - RNA, 20 nt, Artificial Sequence
  targeting sequence with CTCN PAM
uugaaucugaucauugcgua

SEQ ID NO: 11348 - RNA, 20 nt, Artificial Sequence
  targeting sequence with CTCN PAM
acugaaucacaacuagaguc

SEQ ID NO: 11349 - RNA, 20 nt, Artificial Sequence
  targeting sequence with CTCN PAM
aguugugauucaguugagac

SEQ ID NO: 11350 - RNA, 20 nt, Artificial Sequence
  targeting sequence with CTCN PAM
uaccucagccuccugaguag

SEQ ID NO: 11351 - RNA, 20 nt, Artificial Sequence
  targeting sequence with CTCN PAM
gccuccugaguagcugggac

SEQ ID NO: 11352 - RNA, 20 nt, Artificial Sequence
  targeting sequence with CTCN PAM
ugaguagcugggacuacagg

SEQ ID NO: 11353 - RNA, 20 nt, Artificial Sequence
  targeting sequence with CTCN PAM
ggaggcugagguaggaggau

SEQ ID NO: 11354 - RNA, 20 nt, Artificial Sequence
  targeting sequence with CTCN PAM
uaccuuucuuccuaaagaau

SEQ ID NO: 11355 - RNA, 20 nt, Artificial Sequence
  targeting sequence with CTCN PAM
ugauacccacugauccagcc

SEQ ID NO: 11356 - RNA, 20 nt, Artificial Sequence
  targeting sequence with CTCN PAM
uagaguuauccugaaguuuu

SEQ ID NO: 11357 - RNA, 20 nt, Artificial Sequence
  targeting sequence with CTCN PAM
acgaguacggaagcuucugc

SEQ ID NO: 11358 - RNA, 20 nt, Artificial Sequence
  targeting sequence with CTCN PAM
cugccaagccucacaaauau

SEQ ID NO: 11359 - RNA, 20 nt, Artificial Sequence
  targeting sequence with CTCN PAM
gccaagccucacaaauauuu

SEQ ID NO: 11360 - RNA, 20 nt, Artificial Sequence
  targeting sequence with CTCN PAM
caaauauuuauauuuaccuu

SEQ ID NO: 11361 - RNA, 20 nt, Artificial Sequence
  targeting sequence with CTCN PAM
uccagauuggcgagcugaua

SEQ ID NO: 11362 - RNA, 20 nt, Artificial Sequence
  targeting sequence with CTCN PAM
ccaaucuggaagagccaagg

SEQ ID NO: 11363 - RNA, 20 nt, Artificial Sequence
  targeting sequence with CTCN PAM
uauguaacguauuugacaug

SEQ ID NO: 11364 - RNA, 20 nt, Artificial Sequence
  targeting sequence with CTCN PAM
cguauguaacguauuugaca

SEQ ID NO: 11365 - RNA, 20 nt, Artificial Sequence
  targeting sequence with CTCN PAM
cugguguagugauggcucuc

SEQ ID NO: 11366 - RNA, 20 nt, Artificial Sequence
  targeting sequence with CTCN PAM
ugauggaaaaaagcaaaaua

SEQ ID NO: 11367 - RNA, 20 nt, Artificial Sequence
  targeting sequence with CTCN PAM
uuuccuaaucaaacuuacaa

SEQ ID NO: 11368 - RNA, 20 nt, Artificial Sequence
  targeting sequence with CTCN PAM
auuauauuaauuacacaugc

SEQ ID NO: 11369 - RNA, 20 nt, Artificial Sequence
  targeting sequence with CTCN PAM
ccauuauauuaauuacacau

SEQ ID NO: 11370 - RNA, 20 nt, Artificial Sequence
  targeting sequence with CTCN PAM
guggugccuacucuccauua

SEQ ID NO: 11371 - RNA, 20 nt, Artificial Sequence
  targeting sequence with CTCN PAM
ccaguagagaacagggggag

SEQ ID NO: 11372 - RNA, 20 nt, Artificial Sequence
  targeting sequence with CTCN PAM
acuggggagcagucauuagc

SEQ ID NO: 11373 - RNA, 20 nt, Artificial Sequence
  targeting sequence with CTCN PAM
cccuguucucuacuggggag

SEQ ID NO: 11374 - RNA, 20 nt, Artificial Sequence
  targeting sequence with CTCN PAM
uuuaugcaguuauaaccauu

SEQ ID NO: 11375 - RNA, 20 nt, Artificial Sequence
  targeting sequence with CTCN PAM
cauuuauccugaauuuauua

SEQ ID NO: 11376 - RNA, 20 nt, Artificial Sequence
  targeting sequence with CTCN PAM
gaaugauauuauagcagcua

SEQ ID NO: 11377 - RNA, 20 nt, Artificial Sequence
  targeting sequence with CTCN PAM
ucaaguuuagugcaaguuga

SEQ ID NO: 11378 - RNA, 20 nt, Artificial Sequence
  targeting sequence with CTCN PAM
cuaguaagguuuaugcucug

SEQ ID NO: 11379 - RNA, 20 nt, Artificial Sequence
  targeting sequence with CTCN PAM
aguaagguuuaugcucugua

SEQ ID NO: 11380 - RNA, 20 nt, Artificial Sequence
  targeting sequence with CTCN PAM
guaaauuaaaaagaugcagu

SEQ ID NO: 11381 - RNA, 20 nt, Artificial Sequence
  targeting sequence with CTCN PAM
aucaauauuucaaugacuuc

SEQ ID NO: 11382 - RNA, 20 nt, Artificial Sequence
  targeting sequence with CTCN PAM
acaccuaaaacagugccuag

SEQ ID NO: 11383 - RNA, 20 nt, Artificial Sequence
  targeting sequence with CTCN PAM
uaagugucuacuaggcaccc

SEQ ID NO: 11384 - RNA, 20 nt, Artificial Sequence
  targeting sequence with CTCN PAM
uugaaacaguugucugaacu

SEQ ID NO: 11385 - RNA, 20 nt, Artificial Sequence
  targeting sequence with CTCN PAM
uuccaaaaucagcaaagcuc

SEQ ID NO: 11386 - RNA, 20 nt, Artificial Sequence
  targeting sequence with CTCN PAM
auggcauaugaagaacuaaa

SEQ ID NO: 11387 - RNA, 20 nt, Artificial Sequence
  targeting sequence with CTCN PAM
agcagcagcagcaguggggu

SEQ ID NO: 11388 - RNA, 20 nt, Artificial Sequence
  targeting sequence with CTCN PAM
cagauggggucccacugcca

SEQ ID NO: 11389 - RNA, 20 nt, Artificial Sequence
  targeting sequence with CTCN PAM
accaacugggcuuuucugau

SEQ ID NO: 11390 - RNA, 20 nt, Artificial Sequence
  targeting sequence with CTCN PAM
auaauuaagaaaccacuuuu

SEQ ID NO: 11391 - RNA, 20 nt, Artificial Sequence
  targeting sequence with CTCN PAM
caauaauuaagaaaccacuu

SEQ ID NO: 11392 - RNA, 20 nt, Artificial Sequence
  targeting sequence with CTCN PAM
uccuuuuccucucaauaauu

SEQ ID NO: 11393 - RNA, 20 nt, Artificial Sequence
  targeting sequence with CTCN PAM
uguggauaauauacagauau

SEQ ID NO: 11394 - RNA, 20 nt, Artificial Sequence
  targeting sequence with CTCN PAM
ccuguggauaauauacagau

SEQ ID NO: 11395 - RNA, 20 nt, Artificial Sequence
  targeting sequence with CTCN PAM
cuaugguuucauuacuguga

SEQ ID NO: 11396 - RNA, 20 nt, Artificial Sequence
  targeting sequence with CTCN PAM
caguaaugaaaccauaggga

SEQ ID NO: 11397 - RNA, 20 nt, Artificial Sequence
  targeting sequence with CTCN PAM
caacguguuuaauuuuauuu

SEQ ID NO: 11398 - RNA, 20 nt, Artificial Sequence
  targeting sequence with CTCN PAM
cacaacguguuuaauuuuau

SEQ ID NO: 11399 - RNA, 20 nt, Artificial Sequence
  targeting sequence with CTCN PAM
acagugaagguaucuuuggu

SEQ ID NO: 11400 - RNA, 20 nt, Artificial Sequence
  targeting sequence with CTCN PAM
uagguaacauuaaggguuaa

SEQ ID NO: 11401 - RNA, 20 nt, Artificial Sequence
  targeting sequence with CTCN PAM
uuucauggacaucuuuuaac

SEQ ID NO: 11402 - RNA, 20 nt, Artificial Sequence
  targeting sequence with CTCN PAM
uggugccucauuucauggac

SEQ ID NO: 11403 - RNA, 20 nt, Artificial Sequence
  targeting sequence with CTCN PAM
guuccacgaacuauucuacc

SEQ ID NO: 11404 - RNA, 20 nt, Artificial Sequence
  targeting sequence with CTCN PAM
agcgaucuucccaccucagc

SEQ ID NO: 11405 - RNA, 20 nt, Artificial Sequence
  targeting sequence with CTCN PAM
auagugaucacauagcgcuc

SEQ ID NO: 11406 - RNA, 20 nt, Artificial Sequence
  targeting sequence with CTCN PAM
gccagaagcagcaaucucuc

SEQ ID NO: 11407 - RNA, 20 nt, Artificial Sequence
  targeting sequence with CTCN PAM
caauuauuacaaguuuagua

SEQ ID NO: 11408 - RNA, 20 nt, Artificial Sequence
  targeting sequence with CTCN PAM
auuauuacaaguuuaguaga

SEQ ID NO: 11409 - RNA, 20 nt, Artificial Sequence
  targeting sequence with CTCN PAM
uuucauucuugauaaauuaa

SEQ ID NO: 11410 - RNA, 20 nt, Artificial Sequence
  targeting sequence with CTCN PAM
cucauuucauucuugauaaa

SEQ ID NO: 11411 - RNA, 20 nt, Artificial Sequence
  targeting sequence with CTCN PAM
ggcaguucagaacuuuguca

SEQ ID NO: 11412 - RNA, 20 nt, Artificial Sequence
  targeting sequence with CTCN PAM
guuaaguauauuuaauagaa

SEQ ID NO: 11413 - RNA, 20 nt, Artificial Sequence
  targeting sequence with CTCN PAM
uuucacuaguuuggaaagaa

SEQ ID NO: 11414 - RNA, 20 nt, Artificial Sequence
  targeting sequence with CTCN PAM
guaguccaccaaauaugaaa

SEQ ID NO: 11415 - RNA, 20 nt, Artificial Sequence
  targeting sequence with CTCN PAM
uuacuaagugcuuuuuauuc

SEQ ID NO: 11416 - RNA, 20 nt, Artificial Sequence
  targeting sequence with CTCN PAM
ugauaagaacacuaacauga

SEQ ID NO: 11417 - RNA, 20 nt, Artificial Sequence
  targeting sequence with CTCN PAM
gacuucuuuuuuaaauggca

SEQ ID NO: 11418 - RNA, 20 nt, Artificial Sequence
  targeting sequence with CTCN PAM
gcuuucucagacuucuuuuu

SEQ ID NO: 11419 - RNA, 20 nt, Artificial Sequence
  targeting sequence with CTCN PAM
uugcuuugauuccccuuuuu

SEQ ID NO: 11420 - RNA, 20 nt, Artificial Sequence
  targeting sequence with CTCN PAM
agaauggcuauucuuauuca

SEQ ID NO: 11421 - RNA, 20 nt, Artificial Sequence
  targeting sequence with CTCN PAM
acucuagaauggcuauucuu

SEQ ID NO: 11422 - RNA, 20 nt, Artificial Sequence
  targeting sequence with CTCN PAM
augaguacccaucacuagag

SEQ ID NO: 11423 - RNA, 20 nt, Artificial Sequence
  targeting sequence with CTCN PAM
uagagucuuucucuacucua

SEQ ID NO: 11424 - RNA, 20 nt, Artificial Sequence
  targeting sequence with CTCN PAM
agugauggguacucauagag

SEQ ID NO: 11425 - RNA, 20 nt, Artificial Sequence
  targeting sequence with CTCN PAM
gcugcugcccucuagugaug

SEQ ID NO: 11426 - RNA, 20 nt, Artificial Sequence
  targeting sequence with CTCN PAM
cucugcugcugcccucuagu

SEQ ID NO: 11427 - RNA, 20 nt, Artificial Sequence
  targeting sequence with CTCN PAM
cuaccucacucugcugcugc

SEQ ID NO: 11428 - RNA, 20 nt, Artificial Sequence
  targeting sequence with CTCN PAM
cccuaccucacucugcugcu

SEQ ID NO: 11429 - RNA, 20 nt, Artificial Sequence
  targeting sequence with CTCN PAM
gagcacucgccaguuuucug

SEQ ID NO: 11430 - RNA, 20 nt, Artificial Sequence
  targeting sequence with CTCN PAM
gagaaggacuugcucucccu

SEQ ID NO: 11431 - RNA, 20 nt, Artificial Sequence
  targeting sequence with CTCN PAM
aucacauugcuguuuuuuga

SEQ ID NO: 11432 - RNA, 20 nt, Artificial Sequence
  targeting sequence with CTCN PAM
cuaaaaauuauuuugaaaaa

SEQ ID NO: 11433 - RNA, 20 nt, Artificial Sequence
  targeting sequence with CTCN PAM
gggcauuaauaggguaagca

SEQ ID NO: 11434 - RNA, 20 nt, Artificial Sequence
  targeting sequence with CTCN PAM
ggugguccuggugaugaccu

SEQ ID NO: 11435 - RNA, 20 nt, Artificial Sequence
  targeting sequence with CTCN PAM
uuggaaguucuguguguagg

SEQ ID NO: 11436 - RNA, 20 nt, Artificial Sequence
  targeting sequence with CTCN PAM
uuauagguaagugaucagaa

SEQ ID NO: 11437 - RNA, 20 nt, Artificial Sequence
  targeting sequence with CTCN PAM
guucagucuccuuauaggua

SEQ ID NO: 11438 - RNA, 20 nt, Artificial Sequence
  targeting sequence with CTCN PAM
ggucacagcauguguuagag

SEQ ID NO: 11439 - RNA, 20 nt, Artificial Sequence
  targeting sequence with CTCN PAM
aacacaugcugugaccagag

SEQ ID NO: 11440 - RNA, 20 nt, Artificial Sequence
  targeting sequence with CTCN PAM
aucaggguuucucaaccugg

SEQ ID NO: 11441 - RNA, 20 nt, Artificial Sequence
  targeting sequence with CTCN PAM
accuggacucuagugacauu

SEQ ID NO: 11442 - RNA, 20 nt, Artificial Sequence
  targeting sequence with CTCN PAM
agugacauucuggacaggau

SEQ ID NO: 11443 - RNA, 20 nt, Artificial Sequence
  targeting sequence with CTCN PAM
uaagggguauucgaauacuu

SEQ ID NO: 11444 - RNA, 20 nt, Artificial Sequence
  targeting sequence with CTCN PAM
caauuccaauaaguuaagcu

SEQ ID NO: 11445 - RNA, 20 nt, Artificial Sequence
  targeting sequence with CTCN PAM
uuuauuuccagcaugacggu

SEQ ID NO: 11446 - RNA, 20 nt, Artificial Sequence
  targeting sequence with CTCN PAM
cauguaucucuuuuauuucc

SEQ ID NO: 11447 - RNA, 20 nt, Artificial Sequence
  targeting sequence with CTCN PAM
aagagauguuaaauaaaauu

SEQ ID NO: 11448 - RNA, 20 nt, Artificial Sequence
  targeting sequence with CTCN PAM
uugagguaaaugcuuuuuuu

SEQ ID NO: 11449 - RNA, 20 nt, Artificial Sequence
  targeting sequence with CTCN PAM
cuucuaaucuuguguagcaa

SEQ ID NO: 11450 - RNA, 20 nt, Artificial Sequence
  targeting sequence with CTCN PAM
uucaggauucaguaucuuua

SEQ ID NO: 11451 - RNA, 20 nt, Artificial Sequence
  targeting sequence with CTCN PAM
ugauguaacaaaauaauuau

SEQ ID NO: 11452 - RNA, 20 nt, Artificial Sequence
  targeting sequence with CTCN PAM
ucaguucaauaugaauuaag

SEQ ID NO: 11453 - RNA, 20 nt, Artificial Sequence
  targeting sequence with CTCN PAM
gcuauaugaaaauaauauua

SEQ ID NO: 11454 - RNA, 20 nt, Artificial Sequence
  targeting sequence with CTCN PAM
aaucuagauaguuuggauaa

SEQ ID NO: 11455 - RNA, 20 nt, Artificial Sequence
  targeting sequence with CTCN PAM
guugguaaguacguuauucu

SEQ ID NO: 11456 - RNA, 20 nt, Artificial Sequence
  targeting sequence with CTCN PAM
uugucuuuucaaucgaugau

SEQ ID NO: 11457 - RNA, 20 nt, Artificial Sequence
  targeting sequence with CTCN PAM
acguaacacagauaaucaau

SEQ ID NO: 11458 - RNA, 20 nt, Artificial Sequence
  targeting sequence with CTCN PAM
acaauacuuguuauuaucug

SEQ ID NO: 11459 - RNA, 20 nt, Artificial Sequence
  targeting sequence with CTCN PAM
uauauugcuggugggauuac

SEQ ID NO: 11460 - RNA, 20 nt, Artificial Sequence
  targeting sequence with CTCN PAM
uggauguauaucuagaaguc

SEQ ID NO: 11461 - RNA, 20 nt, Artificial Sequence
  targeting sequence with CTCN PAM
aauuuaagaauuuucuccuu

SEQ ID NO: 11462 - RNA, 20 nt, Artificial Sequence
  targeting sequence with CTCN PAM
uugaagagcugcugcugaac

SEQ ID NO: 11463 - RNA, 20 nt, Artificial Sequence
  targeting sequence with CTCN PAM
ucaaggagaaaauucuuaaa

SEQ ID NO: 11464 - RNA, 20 nt, Artificial Sequence
  targeting sequence with CTCN PAM
caagaucaugcuguccuuuu

SEQ ID NO: 11465 - RNA, 20 nt, Artificial Sequence
  targeting sequence with CTCN PAM
agaucaugcuguccuuuugu

SEQ ID NO: 11466 - RNA, 20 nt, Artificial Sequence
  targeting sequence with CTCN PAM
aagcuaaaaugcuuggaauu

SEQ ID NO: 11467 - RNA, 20 nt, Artificial Sequence
  targeting sequence with CTCN PAM
cuaucuaauucacaaacauc

SEQ ID NO: 11468 - RNA, 20 nt, Artificial Sequence
  targeting sequence with CTCN PAM
aucuaauucacaaacauccu

SEQ ID NO: 11469 - RNA, 20 nt, Artificial Sequence
  targeting sequence with CTCN PAM
cagaucuccuuggcacgauu

SEQ ID NO: 11470 - RNA, 20 nt, Artificial Sequence
  targeting sequence with CTCN PAM
uuggcacgauuccagcccag

SEQ ID NO: 11471 - RNA, 20 nt, Artificial Sequence
  targeting sequence with CTCN PAM
guaucugggcuggaaucgug

SEQ ID NO: 11472 - RNA, 20 nt, Artificial Sequence
  targeting sequence with CTCN PAM
aaauacugcaaaaagaaaua

SEQ ID NO: 11473 - RNA, 20 nt, Artificial Sequence
  targeting sequence with CTCN PAM
aggcauucauuccuaaaagc

SEQ ID NO: 11474 - RNA, 20 nt, Artificial Sequence
  targeting sequence with CTCN PAM
cgguaaguguaccggccauc

SEQ ID NO: 11475 - RNA, 20 nt, Artificial Sequence
  targeting sequence with CTCN PAM
acacuaguggauggccggua

SEQ ID NO: 11476 - RNA, 20 nt, Artificial Sequence
  targeting sequence with CTCN PAM
aggcccggccacagcagcug

SEQ ID NO: 11477 - RNA, 20 nt, Artificial Sequence
  targeting sequence with CTCN PAM
uggcgaaaauaacaaaaaga

SEQ ID NO: 11478 - RNA, 20 nt, Artificial Sequence
  targeting sequence with CTCN PAM
uuaccacuuuucuuuuuguu

SEQ ID NO: 11479 - RNA, 20 nt, Artificial Sequence
  targeting sequence with CTCN PAM
uucauaaaacaaaccuauca

SEQ ID NO: 11480 - RNA, 20 nt, Artificial Sequence
  targeting sequence with CTCN PAM
cucauucauaaaacaaaccu

SEQ ID NO: 11481 - RNA, 20 nt, Artificial Sequence
  targeting sequence with CTCN PAM
augaaauuacucgcucauuc

SEQ ID NO: 11482 - RNA, 20 nt, Artificial Sequence
  targeting sequence with CTCN PAM
gcuuaauaauccccaguuug

SEQ ID NO: 11483 - RNA, 20 nt, Artificial Sequence
  targeting sequence with CTCN PAM
agucaucucagcuuaauaau

SEQ ID NO: 11484 - RNA, 20 nt, Artificial Sequence
  targeting sequence with CTCN PAM
uuauauugaccauuuagagc

SEQ ID NO: 11485 - RNA, 20 nt, Artificial Sequence
  targeting sequence with CTCN PAM
aaauggucaauauaaagagu

SEQ ID NO: 11486 - RNA, 20 nt, Artificial Sequence
  targeting sequence with CTCN PAM
augcacucauaauucagucu

SEQ ID NO: 11487 - RNA, 20 nt, Artificial Sequence
  targeting sequence with CTCN PAM
uaauucagucuucaacuucu

SEQ ID NO: 11488 - RNA, 20 nt, Artificial Sequence
  targeting sequence with CTCN PAM
uguuugcaguucuuagcuuu

SEQ ID NO: 11489 - RNA, 20 nt, Artificial Sequence
  targeting sequence with CTCN PAM
gaaguugcuaauuccuuguu

SEQ ID NO: 11490 - RNA, 20 nt, Artificial Sequence
  targeting sequence with CTCN PAM
auuuuacuuaccaugcaguu

SEQ ID NO: 11491 - RNA, 20 nt, Artificial Sequence
  targeting sequence with CTCN PAM
uaugaaaguguuuuaacuag

SEQ ID NO: 11492 - RNA, 20 nt, Artificial Sequence
  targeting sequence with CTCN PAM
uuauaaagagaacuacuuuu

SEQ ID NO: 11493 - RNA, 20 nt, Artificial Sequence
  targeting sequence with CTCN PAM
uuauaaagaguauuacacaa

SEQ ID NO: 11494 - RNA, 20 nt, Artificial Sequence
  targeting sequence with CTCN PAM
acaagggucuucaucuuaca

SEQ ID NO: 11495 - RNA, 20 nt, Artificial Sequence
  targeting sequence with CTCN PAM
acaaagacaacaaaagugua

SEQ ID NO: 11496 - RNA, 20 nt, Artificial Sequence
  targeting sequence with CTCN PAM
cuauugaauauguaaaugug

SEQ ID NO: 11497 - RNA, 20 nt, Artificial Sequence
  targeting sequence with CTCN PAM
cauuuacauauucaauagug

SEQ ID NO: 11498 - RNA, 20 nt, Artificial Sequence
  targeting sequence with CTCN PAM
uagggaucagccaauccuca

SEQ ID NO: 11499 - RNA, 20 nt, Artificial Sequence
  targeting sequence with CTCN PAM
aucagcaaauacuguauuuc

SEQ ID NO: 11500 - RNA, 20 nt, Artificial Sequence
  targeting sequence with CTCN PAM
ccagccacuaggcacaggag

SEQ ID NO: 11501 - RNA, 20 nt, Artificial Sequence
  targeting sequence with CTCN PAM
ugugccuaguggcuggugag

SEQ ID NO: 11502 - RNA, 20 nt, Artificial Sequence
  targeting sequence with CTCN PAM
cacuaaagcauuuuccgaag

SEQ ID NO: 11503 - RNA, 20 nt, Artificial Sequence
  targeting sequence with CTCN PAM
ugacuucggaaaaugcuuua

SEQ ID NO: 11504 - RNA, 20 nt, Artificial Sequence
  targeting sequence with CTCN PAM
uacccugugaagggcuguac

SEQ ID NO: 11505 - RNA, 20 nt, Artificial Sequence
  targeting sequence with CTCN PAM
gcacuaaaugucucucuguc

SEQ ID NO: 11506 - RNA, 20 nt, Artificial Sequence
  targeting sequence with CTCN PAM
cuguccuaagcugcaccuua

SEQ ID NO: 11507 - RNA, 20 nt, Artificial Sequence
  targeting sequence with CTCN PAM
guccuaagcugcaccuuauu

SEQ ID NO: 11508 - RNA, 20 nt, Artificial Sequence
  targeting sequence with CTCN PAM
ugaaauaaggugcagcuuag

SEQ ID NO: 11509 - RNA, 20 nt, Artificial Sequence
  targeting sequence with CTCN PAM
acuugcuuuuuuucauaauu

SEQ ID NO: 11510 - RNA, 20 nt, Artificial Sequence
  targeting sequence with CTCN PAM
uuuguaaaacucaacuugcu

SEQ ID NO: 11511 - RNA, 20 nt, Artificial Sequence
  targeting sequence with CTCN PAM
auauucaucaacaugccuca

SEQ ID NO: 11512 - RNA, 20 nt, Artificial Sequence
  targeting sequence with CTCN PAM
aaauuauacagccaaucaua

SEQ ID NO: 11513 - RNA, 20 nt, Artificial Sequence
  targeting sequence with CTCN PAM
gauuuaauaaacuugcaaag

SEQ ID NO: 11514 - RNA, 20 nt, Artificial Sequence
  targeting sequence with CTCN PAM
caaguaguugaccuuuaaua

SEQ ID NO: 11515 - RNA, 20 nt, Artificial Sequence
  targeting sequence with CTCN PAM
ucagcaagaagcaaauauau

SEQ ID NO: 11516 - RNA, 20 nt, Artificial Sequence
  targeting sequence with CTCN PAM
ucuccaauuacaaugaagau

SEQ ID NO: 11517 - RNA, 20 nt, Artificial Sequence
  targeting sequence with CTCN PAM
aauuacaaugaagauaucug

SEQ ID NO: 11518 - RNA, 20 nt, Artificial Sequence
  targeting sequence with CTCN PAM
gugacauuaucagauaucuu

SEQ ID NO: 11519 - RNA, 20 nt, Artificial Sequence
  targeting sequence with CTCN PAM
acucugugacauuaucagau

SEQ ID NO: 11520 - RNA, 20 nt, Artificial Sequence
  targeting sequence with CTCN PAM
acauuagaugaagccuuaga

SEQ ID NO: 11521 - RNA, 20 nt, Artificial Sequence
  targeting sequence with CTCN PAM
aaggcuucaucuaauguuga

SEQ ID NO: 11522 - RNA, 20 nt, Artificial Sequence
  targeting sequence with GTCN PAM
caucugaaucaucagaaugu

SEQ ID NO: 11523 - RNA, 20 nt, Artificial Sequence
  targeting sequence with GTCN PAM
uagagaaauaaucaaaagga

SEQ ID NO: 11524 - RNA, 20 nt, Artificial Sequence
  targeting sequence with GTCN PAM
uccucagcuuugcgcuugaa

SEQ ID NO: 11525 - RNA, 20 nt, Artificial Sequence
  targeting sequence with GTCN PAM
guguuucccagauggucauc

SEQ ID NO: 11526 - RNA, 20 nt, Artificial Sequence
  targeting sequence with GTCN PAM
ucucugugguaagaauuagg

SEQ ID NO: 11527 - RNA, 20 nt, Artificial Sequence
  targeting sequence with GTCN PAM
uugugucaucucugugguaa

SEQ ID NO: 11528 - RNA, 20 nt, Artificial Sequence
  targeting sequence with GTCN PAM
gaaaaaucuccuacacauaa

SEQ ID NO: 11529 - RNA, 20 nt, Artificial Sequence
  targeting sequence with GTCN PAM
gugacaguugacaaggagag

SEQ ID NO: 11530 - RNA, 20 nt, Artificial Sequence
  targeting sequence with GTCN PAM
cugacauggggguuccucag

SEQ ID NO: 11531 - RNA, 20 nt, Artificial Sequence
  targeting sequence with GTCN PAM
acugucacugacaugggggu

SEQ ID NO: 11532 - RNA, 20 nt, Artificial Sequence
  targeting sequence with GTCN PAM
cuccuugucaacugucacug

SEQ ID NO: 11533 - RNA, 20 nt, Artificial Sequence
  targeting sequence with GTCN PAM
ucaaccauggugaaacuggg

SEQ ID NO: 11534 - RNA, 20 nt, Artificial Sequence
  targeting sequence with GTCN PAM
aacccauuccugaaucugug

SEQ ID NO: 11535 - RNA, 20 nt, Artificial Sequence
  targeting sequence with GTCN PAM
cuuacuugcaguaaauggcc

SEQ ID NO: 11536 - RNA, 20 nt, Artificial Sequence
  targeting sequence with GTCN PAM
cuuguuucaggagaucacuu

SEQ ID NO: 11537 - RNA, 20 nt, Artificial Sequence
  targeting sequence with GTCN PAM
caccuuaaauugcaaaagau

SEQ ID NO: 11538 - RNA, 20 nt, Artificial Sequence
  targeting sequence with GTCN PAM
cccugaagccaucgugccca

SEQ ID NO: 11539 - RNA, 20 nt, Artificial Sequence
  targeting sequence with GTCN PAM
uuguacauaccauuuucucu

SEQ ID NO: 11540 - RNA, 20 nt, Artificial Sequence
  targeting sequence with GTCN PAM
aaaugagagagaaaauggua

SEQ ID NO: 11541 - RNA, 20 nt, Artificial Sequence
  targeting sequence with GTCN PAM
ggaaaggcuuccuugaggaa

SEQ ID NO: 11542 - RNA, 20 nt, Artificial Sequence
  targeting sequence with GTCN PAM
ucuucugagcccugcaaacu

SEQ ID NO: 11543 - RNA, 20 nt, Artificial Sequence
  targeting sequence with GTCN PAM
cuaggaaguuccaaacuuuc

SEQ ID NO: 11544 - RNA, 20 nt, Artificial Sequence
  targeting sequence with GTCN PAM
aagccauucaacaagucucu

SEQ ID NO: 11545 - RNA, 20 nt, Artificial Sequence
  targeting sequence with GTCN PAM
auauuauuauuagcauuuuu

SEQ ID NO: 11546 - RNA, 20 nt, Artificial Sequence
  targeting sequence with GTCN PAM
cagauggagaugaggaacuu

SEQ ID NO: 11547 - RNA, 20 nt, Artificial Sequence
  targeting sequence with GTCN PAM
guuuacuaaaauauagcaag

SEQ ID NO: 11548 - RNA, 20 nt, Artificial Sequence
  targeting sequence with GTCN PAM
ccucuugaaugcuuugcugc

SEQ ID NO: 11549 - RNA, 20 nt, Artificial Sequence
  targeting sequence with GTCN PAM
gcaugacccggcugugagac

SEQ ID NO: 11550 - RNA, 20 nt, Artificial Sequence
  targeting sequence with GTCN PAM
ugcugacacaagaggugggu

SEQ ID NO: 11551 - RNA, 20 nt, Artificial Sequence
  targeting sequence with GTCN PAM
cacagccgggucaugcugac

SEQ ID NO: 11552 - RNA, 20 nt, Artificial Sequence
  targeting sequence with GTCN PAM
aaucuuaaagcuccaaaaug

SEQ ID NO: 11553 - RNA, 20 nt, Artificial Sequence
  targeting sequence with GTCN PAM
aaaauccagcagggcaguca

SEQ ID NO: 11554 - RNA, 20 nt, Artificial Sequence
  targeting sequence with GTCN PAM
auuuuacacuguugauaaag

SEQ ID NO: 11555 - RNA, 20 nt, Artificial Sequence
  targeting sequence with GTCN PAM
uauucaaauaaucauauaaa

SEQ ID NO: 11556 - RNA, 20 nt, Artificial Sequence
  targeting sequence with GTCN PAM
caaacuccugggcucaagug

SEQ ID NO: 11557 - RNA, 20 nt, Artificial Sequence
  targeting sequence with GTCN PAM
gucuguagucccagcuauca

SEQ ID NO: 11558 - RNA, 20 nt, Artificial Sequence
  targeting sequence with GTCN PAM
gaauugauuuaauccuagua

SEQ ID NO: 11559 - RNA, 20 nt, Artificial Sequence
  targeting sequence with GTCN PAM
uuuaagucauugagcucuug

SEQ ID NO: 11560 - RNA, 20 nt, Artificial Sequence
  targeting sequence with GTCN PAM
aagagcacccagcuccacug

SEQ ID NO: 11561 - RNA, 20 nt, Artificial Sequence
  targeting sequence with GTCN PAM
caggaaaaaaaaaaaaucaa

SEQ ID NO: 11562 - RNA, 20 nt, Artificial Sequence
  targeting sequence with GTCN PAM
ccaccacauaguuugcugug

SEQ ID NO: 11563 - RNA, 20 nt, Artificial Sequence
  targeting sequence with GTCN PAM
uuucuccuuuccagaaacca

SEQ ID NO: 11564 - RNA, 20 nt, Artificial Sequence
  targeting sequence with GTCN PAM
gcccugcacacaaugacguc

SEQ ID NO: 11565 - RNA, 20 nt, Artificial Sequence
  targeting sequence with GTCN PAM
uccauuaccgcaacuccuca

SEQ ID NO: 11566 - RNA, 20 nt, Artificial Sequence
  targeting sequence with GTCN PAM
cccugagcauuucggcguca

SEQ ID NO: 11567 - RNA, 20 nt, Artificial Sequence
  targeting sequence with GTCN PAM
gaguuuuuaaagauaauuug

SEQ ID NO: 11568 - RNA, 20 nt, Artificial Sequence
  targeting sequence with GTCN PAM
ggguggugucagcugaucca

SEQ ID NO: 11569 - RNA, 20 nt, Artificial Sequence
  targeting sequence with GTCN PAM
gcugauccaucgagugcagg

SEQ ID NO: 11570 - RNA, 20 nt, Artificial Sequence
  targeting sequence with GTCN PAM
gcaaaauauuucaagcacua

SEQ ID NO: 11571 - RNA, 20 nt, Artificial Sequence
  targeting sequence with GTCN PAM
caggaugagauacgaggucg

SEQ ID NO: 11572 - RNA, 20 nt, Artificial Sequence
  targeting sequence with GTCN PAM
gcacaagauacagguaauaa

SEQ ID NO: 11573 - RNA, 20 nt, Artificial Sequence
  targeting sequence with GTCN PAM
ggaaguuacccuauaugguc

SEQ ID NO: 11574 - RNA, 20 nt, Artificial Sequence
  targeting sequence with GTCN PAM
aaaaagggaaggcaugaaua

SEQ ID NO: 11575 - RNA, 20 nt, Artificial Sequence
  targeting sequence with GTCN PAM
uggagagcugaagucaggac

SEQ ID NO: 11576 - RNA, 20 nt, Artificial Sequence
  targeting sequence with GTCN PAM
uggugaauggaggccacagu

SEQ ID NO: 11577 - RNA, 20 nt, Artificial Sequence
  targeting sequence with GTCN PAM
aagugcuuccaaaugucaca

SEQ ID NO: 11578 - RNA, 20 nt, Artificial Sequence
  targeting sequence with GTCN PAM
caugguuuccugcaggucua

SEQ ID NO: 11579 - RNA, 20 nt, Artificial Sequence
  targeting sequence with GTCN PAM
aggccuuugcaaaaccauaa

SEQ ID NO: 11580 - RNA, 20 nt, Artificial Sequence
  targeting sequence with GTCN PAM
cuguccacuugaugacucag

SEQ ID NO: 11581 - RNA, 20 nt, Artificial Sequence
  targeting sequence with GTCN PAM
gguuuuucuucuuuggagag

SEQ ID NO: 11582 - RNA, 20 nt, Artificial Sequence
  targeting sequence with GTCN PAM
cucuccaaagaagaaaaacc

SEQ ID NO: 11583 - RNA, 20 nt, Artificial Sequence
  targeting sequence with GTCN PAM
aggaaaagccaggcucacuu

SEQ ID NO: 11584 - RNA, 20 nt, Artificial Sequence
  targeting sequence with GTCN PAM
acuugguuaagugacuuaac

SEQ ID NO: 11585 - RNA, 20 nt, Artificial Sequence
  targeting sequence with GTCN PAM
cucacucucuauugcaucuc

SEQ ID NO: 11586 - RNA, 20 nt, Artificial Sequence
  targeting sequence with GTCN PAM
ccuuuuuguugaacacuuac

SEQ ID NO: 11587 - RNA, 20 nt, Artificial Sequence
  targeting sequence with GTCN PAM
ggucuugaagagugaauaag

SEQ ID NO: 11588 - RNA, 20 nt, Artificial Sequence
  targeting sequence with GTCN PAM
ugaagagugaauaagaguuc

SEQ ID NO: 11589 - RNA, 20 nt, Artificial Sequence
  targeting sequence with GTCN PAM
acuuuuugaaauaagccccu

SEQ ID NO: 11590 - RNA, 20 nt, Artificial Sequence
  targeting sequence with GTCN PAM
accuagcaaauccaaaagca

SEQ ID NO: 11591 - RNA, 20 nt, Artificial Sequence
  targeting sequence with GTCN PAM
uauuucuuccuguuuuuauu

SEQ ID NO: 11592 - RNA, 20 nt, Artificial Sequence
  targeting sequence with GTCN PAM
acuggcauugauuguauuac

SEQ ID NO: 11593 - RNA, 20 nt, Artificial Sequence
  targeting sequence with GTCN PAM
cuuuccucaucucaguggga

SEQ ID NO: 11594 - RNA, 20 nt, Artificial Sequence
  targeting sequence with GTCN PAM
accaagggucuugaguugga

SEQ ID NO: 11595 - RNA, 20 nt, Artificial Sequence
  targeting sequence with GTCN PAM
gagauuacacccagguaccg

SEQ ID NO: 11596 - RNA, 20 nt, Artificial Sequence
  targeting sequence with GTCN PAM
gagacuuguaauacucuaag

SEQ ID NO: 11597 - RNA, 20 nt, Artificial Sequence
  targeting sequence with GTCN PAM
cugaccuuaggugggcacag

SEQ ID NO: 11598 - RNA, 20 nt, Artificial Sequence
  targeting sequence with GTCN PAM
cacauuaaccaggcucccuu

SEQ ID NO: 11599 - RNA, 20 nt, Artificial Sequence
  targeting sequence with GTCN PAM
ggggaaauucggccuuuaaa

SEQ ID NO: 11600 - RNA, 20 nt, Artificial Sequence
  targeting sequence with GTCN PAM
cauggcuaagguuccaagcu

SEQ ID NO: 11601 - RNA, 20 nt, Artificial Sequence
  targeting sequence with GTCN PAM
uuguauugcugugagaaaug

SEQ ID NO: 11602 - RNA, 20 nt, Artificial Sequence
  targeting sequence with GTCN PAM
uaauuucuucuuauaacacu

SEQ ID NO: 11603 - RNA, 20 nt, Artificial Sequence
  targeting sequence with GTCN PAM
caagauauuuuccuuuuaua

SEQ ID NO: 11604 - RNA, 20 nt, Artificial Sequence
  targeting sequence with GTCN PAM
cacuaagauaaaugcauauc

SEQ ID NO: 11605 - RNA, 20 nt, Artificial Sequence
  targeting sequence with GTCN PAM
ggaaaggcaggaaaacucaa

SEQ ID NO: 11606 - RNA, 20 nt, Artificial Sequence
  targeting sequence with GTCN PAM
caugccucccuuguuaaaag

SEQ ID NO: 11607 - RNA, 20 nt, Artificial Sequence
  targeting sequence with GTCN PAM
aauucagaaguuauccaaaa

SEQ ID NO: 11608 - RNA, 20 nt, Artificial Sequence
  targeting sequence with GTCN PAM
ccaauucuuuaucagguuuu

SEQ ID NO: 11609 - RNA, 20 nt, Artificial Sequence
  targeting sequence with GTCN PAM
ugauuaaaauaaaauaagaa

SEQ ID NO: 11610 - RNA, 20 nt, Artificial Sequence
  targeting sequence with GTCN PAM
cuacuaaaaauacaaaaauu

SEQ ID NO: 11611 - RNA, 20 nt, Artificial Sequence
  targeting sequence with GTCN PAM
gguccgcaggaauuaaugga

SEQ ID NO: 11612 - RNA, 20 nt, Artificial Sequence
  targeting sequence with GTCN PAM
gcaggaauuaauggagcaca

SEQ ID NO: 11613 - RNA, 20 nt, Artificial Sequence
  targeting sequence with GTCN PAM
agcagggucuccagggcuac

SEQ ID NO: 11614 - RNA, 20 nt, Artificial Sequence
  targeting sequence with GTCN PAM
ccagggcuacucagggagag

SEQ ID NO: 11615 - RNA, 20 nt, Artificial Sequence
  targeting sequence with GTCN PAM
gucucuggucucuuucucuc

SEQ ID NO: 11616 - RNA, 20 nt, Artificial Sequence
  targeting sequence with GTCN PAM
cuggucucuuucucucugug

SEQ ID NO: 11617 - RNA, 20 nt, Artificial Sequence
  targeting sequence with GTCN PAM
cuuucucucugugcaaacug

SEQ ID NO: 11618 - RNA, 20 nt, Artificial Sequence
  targeting sequence with GTCN PAM
gaaaaguaaaaagugcaaug

SEQ ID NO: 11619 - RNA, 20 nt, Artificial Sequence
  targeting sequence with GTCN PAM
caugaauuaaauaaaaggca

SEQ ID NO: 11620 - RNA, 20 nt, Artificial Sequence
  targeting sequence with GTCN PAM
ucaaaauguaaauauguggu

SEQ ID NO: 11621 - RNA, 20 nt, Artificial Sequence
  targeting sequence with GTCN PAM
aaauuauguucaaauauuag

SEQ ID NO: 11622 - RNA, 20 nt, Artificial Sequence
  targeting sequence with GTCN PAM
uaagcugcuucuuuggcuuu

SEQ ID NO: 11623 - RNA, 20 nt, Artificial Sequence
  targeting sequence with GTCN PAM
accuuugaucuauuugguuu

SEQ ID NO: 11624 - RNA, 20 nt, Artificial Sequence
  targeting sequence with GTCN PAM
cccuggugugcuguauucuc

SEQ ID NO: 11625 - RNA, 20 nt, Artificial Sequence
  targeting sequence with GTCN PAM
cuugugcuaagacuuuaagg

SEQ ID NO: 11626 - RNA, 20 nt, Artificial Sequence
  targeting sequence with GTCN PAM
uagcacaagugacuccauuu

SEQ ID NO: 11627 - RNA, 20 nt, Artificial Sequence
  targeting sequence with GTCN PAM
guucuagaaucuguguuucc

SEQ ID NO: 11628 - RNA, 20 nt, Artificial Sequence
  targeting sequence with GTCN PAM
agaauguuugcuauagagau

SEQ ID NO: 11629 - RNA, 20 nt, Artificial Sequence
  targeting sequence with GTCN PAM
cuaggagagaagaaaugaau

SEQ ID NO: 11630 - RNA, 20 nt, Artificial Sequence
  targeting sequence with GTCN PAM
uuuuucuguaacugcuucau

SEQ ID NO: 11631 - RNA, 20 nt, Artificial Sequence
  targeting sequence with GTCN PAM
cucugccucccaugaagauu

SEQ ID NO: 11632 - RNA, 20 nt, Artificial Sequence
  targeting sequence with GTCN PAM
ggaggcagggaauauaaggc

SEQ ID NO: 11633 - RNA, 20 nt, Artificial Sequence
  targeting sequence with GTCN PAM
uagcugaagcgugaaucugc

SEQ ID NO: 11634 - RNA, 20 nt, Artificial Sequence
  targeting sequence with GTCN PAM
cacauuguggaguguacuuu

SEQ ID NO: 11635 - RNA, 20 nt, Artificial Sequence
  targeting sequence with GTCN PAM
auaaaauuucuucauucuuu

SEQ ID NO: 11636 - RNA, 20 nt, Artificial Sequence
  targeting sequence with GTCN PAM
aauucuuuguucaagaugcc

SEQ ID NO: 11637 - RNA, 20 nt, Artificial Sequence
  targeting sequence with GTCN PAM
uuggcaucuugaacaaagaa

SEQ ID NO: 11638 - RNA, 20 nt, Artificial Sequence
  targeting sequence with GTCN PAM
agguccuuggcaucuugaac

SEQ ID NO: 11639 - RNA, 20 nt, Artificial Sequence
  targeting sequence with GTCN PAM
ucagcccucugaggcugugc

SEQ ID NO: 11640 - RNA, 20 nt, Artificial Sequence
  targeting sequence with GTCN PAM
gugucuucagcccucugagg

SEQ ID NO: 11641 - RNA, 20 nt, Artificial Sequence
  targeting sequence with GTCN PAM
ggagcuguagcagccaucgu

SEQ ID NO: 11642 - RNA, 20 nt, Artificial Sequence
  targeting sequence with GTCN PAM
gcgugaggaugaaaggccaa

SEQ ID NO: 11643 - RNA, 20 nt, Artificial Sequence
  targeting sequence with GTCN PAM
auuugugaauuaucuaaucu

SEQ ID NO: 11644 - RNA, 20 nt, Artificial Sequence
  targeting sequence with GTCN PAM
uccauauccccucuugaagc

SEQ ID NO: 11645 - RNA, 20 nt, Artificial Sequence
  targeting sequence with GTCN PAM
aagaagaggggcugguggug

SEQ ID NO: 11646 - RNA, 20 nt, Artificial Sequence
  targeting sequence with GTCN PAM
cagguaucuccugcucacac

SEQ ID NO: 11647 - RNA, 20 nt, Artificial Sequence
  targeting sequence with GTCN PAM
guggagaaugggggaucucu

SEQ ID NO: 11648 - RNA, 20 nt, Artificial Sequence
  targeting sequence with GTCN PAM
cuugcccacucauccuuccc

SEQ ID NO: 11649 - RNA, 20 nt, Artificial Sequence
  targeting sequence with GTCN PAM
agguacccuggcuuucaucc

SEQ ID NO: 11650 - RNA, 20 nt, Artificial Sequence
  targeting sequence with GTCN PAM
cuuaaccacuguggcuuccc

SEQ ID NO: 11651 - RNA, 20 nt, Artificial Sequence
  targeting sequence with GTCN PAM
ccucucaaucacuguagaag

SEQ ID NO: 11652 - RNA, 20 nt, Artificial Sequence
  targeting sequence with GTCN PAM
cucugcaggcuaauggcaga

SEQ ID NO: 11653 - RNA, 20 nt, Artificial Sequence
  targeting sequence with GTCN PAM
ggaguaaaucggcauucagg

SEQ ID NO: 11654 - RNA, 20 nt, Artificial Sequence
  targeting sequence with GTCN PAM
ccauacuugggcaccaucaa

SEQ ID NO: 11655 - RNA, 20 nt, Artificial Sequence
  targeting sequence with GTCN PAM
uuucaaguucugagacucua

SEQ ID NO: 11656 - RNA, 20 nt, Artificial Sequence
  targeting sequence with GTCN PAM
gauguccuuucaaguucuga

SEQ ID NO: 11657 - RNA, 20 nt, Artificial Sequence
  targeting sequence with GTCN PAM
caguuucccgaucuguaaaa

SEQ ID NO: 11658 - RNA, 20 nt, Artificial Sequence
  targeting sequence with GTCN PAM
ucgcacccucccagucucag

SEQ ID NO: 11659 - RNA, 20 nt, Artificial Sequence
  targeting sequence with GTCN PAM
cagucaggaccagaaccagc

SEQ ID NO: 11660 - RNA, 20 nt, Artificial Sequence
  targeting sequence with GTCN PAM
cucuuggaguccaggcuguc

SEQ ID NO: 11661 - RNA, 20 nt, Artificial Sequence
  targeting sequence with GTCN PAM
aggcugucaccagcccucuc

SEQ ID NO: 11662 - RNA, 20 nt, Artificial Sequence
  targeting sequence with GTCN PAM
ccagcccucuccauccacag

SEQ ID NO: 11663 - RNA, 20 nt, Artificial Sequence
  targeting sequence with GTCN PAM
guggauggagagggcuggug

SEQ ID NO: 11664 - RNA, 20 nt, Artificial Sequence
  targeting sequence with GTCN PAM
gccagggcuauucugcggcu

SEQ ID NO: 11665 - RNA, 20 nt, Artificial Sequence
  targeting sequence with GTCN PAM
guggguaagaaauggauuag

SEQ ID NO: 11666 - RNA, 20 nt, Artificial Sequence
  targeting sequence with GTCN PAM
uuuccuuuuuuagagcauaa

SEQ ID NO: 11667 - RNA, 20 nt, Artificial Sequence
  targeting sequence with GTCN PAM
ucugaguuuaugcucuaaaa

SEQ ID NO: 11668 - RNA, 20 nt, Artificial Sequence
  targeting sequence with GTCN PAM
cccaggcacagaauuccagg

SEQ ID NO: 11669 - RNA, 20 nt, Artificial Sequence
  targeting sequence with GTCN PAM
cuugcaggguggcuggagcc

SEQ ID NO: 11670 - RNA, 20 nt, Artificial Sequence
  targeting sequence with GTCN PAM
gaugcaacucuggacccaac

SEQ ID NO: 11671 - RNA, 20 nt, Artificial Sequence
  targeting sequence with GTCN PAM
agaguugcaucagacuuggu

SEQ ID NO: 11672 - RNA, 20 nt, Artificial Sequence
  targeting sequence with GTCN PAM
gcugauuaguaaucuuaauu

SEQ ID NO: 11673 - RNA, 20 nt, Artificial Sequence
  targeting sequence with GTCN PAM
aaccuaaucaugggagcccu

SEQ ID NO: 11674 - RNA, 20 nt, Artificial Sequence
  targeting sequence with GTCN PAM
cucaugugcugugcaaucuu

SEQ ID NO: 11675 - RNA, 20 nt, Artificial Sequence
  targeting sequence with GTCN PAM
aggucccuguuguacuucag

SEQ ID NO: 11676 - RNA, 20 nt, Artificial Sequence
  targeting sequence with GTCN PAM
cuguuguacuucagauuugc

SEQ ID NO: 11677 - RNA, 20 nt, Artificial Sequence
  targeting sequence with GTCN PAM
cguagcaaaucugaaguaca

SEQ ID NO: 11678 - RNA, 20 nt, Artificial Sequence
  targeting sequence with GTCN PAM
uguccugugcauuguagguu

SEQ ID NO: 11679 - RNA, 20 nt, Artificial Sequence
  targeting sequence with GTCN PAM
ugugcauuguagguugcuac

SEQ ID NO: 11680 - RNA, 20 nt, Artificial Sequence
  targeting sequence with GTCN PAM
cccagccgagccagggaaau

SEQ ID NO: 11681 - RNA, 20 nt, Artificial Sequence
  targeting sequence with GTCN PAM
ugagccaagugacaccuggu

SEQ ID NO: 11682 - RNA, 20 nt, Artificial Sequence
  targeting sequence with GTCN PAM
cuuggcucaggacccagccg

SEQ ID NO: 11683 - RNA, 20 nt, Artificial Sequence
  targeting sequence with GTCN PAM
cugcacucaggaggucccca

SEQ ID NO: 11684 - RNA, 20 nt, Artificial Sequence
  targeting sequence with GTCN PAM
ccauaaacuaggggagauuc

SEQ ID NO: 11685 - RNA, 20 nt, Artificial Sequence
  targeting sequence with GTCN PAM
aguuccagggccugagcuuc

SEQ ID NO: 11686 - RNA, 20 nt, Artificial Sequence
  targeting sequence with GTCN PAM
acuggaugaagggcagccug

SEQ ID NO: 11687 - RNA, 20 nt, Artificial Sequence
  targeting sequence with GTCN PAM
auguccacuggaugaagggc

SEQ ID NO: 11688 - RNA, 20 nt, Artificial Sequence
  targeting sequence with GTCN PAM
cccaggauggcagguuagca

SEQ ID NO: 11689 - RNA, 20 nt, Artificial Sequence
  targeting sequence with GTCN PAM
cgcuccuuccauguggaucc

SEQ ID NO: 11690 - RNA, 20 nt, Artificial Sequence
  targeting sequence with GTCN PAM
gaggcccgggaggaguuaag

SEQ ID NO: 11691 - RNA, 20 nt, Artificial Sequence
  targeting sequence with GTCN PAM
agaggagaaaccugcuucug

SEQ ID NO: 11692 - RNA, 20 nt, Artificial Sequence
  targeting sequence with GTCN PAM
aagagcuaggagaggcuguc

SEQ ID NO: 11693 - RNA, 20 nt, Artificial Sequence
  targeting sequence with GTCN PAM
cccauccccaaagucaaaga

SEQ ID NO: 11694 - RNA, 20 nt, Artificial Sequence
  targeting sequence with GTCN PAM
ccagcucaaagccuuuucau

SEQ ID NO: 11695 - RNA, 20 nt, Artificial Sequence
  targeting sequence with GTCN PAM
agggggcaagugccuccugu

SEQ ID NO: 11696 - RNA, 20 nt, Artificial Sequence
  targeting sequence with GTCN PAM
uuuggauauauuguuguugg

SEQ ID NO: 11697 - RNA, 20 nt, Artificial Sequence
  targeting sequence with GTCN PAM
cuguaccuguaacuucccau

SEQ ID NO: 11698 - RNA, 20 nt, Artificial Sequence
  targeting sequence with GTCN PAM
auuguaccuuccagucccug

SEQ ID NO: 11699 - RNA, 20 nt, Artificial Sequence
  targeting sequence with GTCN PAM
ccaaagccaauuucuaggcu

SEQ ID NO: 11700 - RNA, 20 nt, Artificial Sequence
  targeting sequence with GTCN PAM
gaguuguccccaaagccaau

SEQ ID NO: 11701 - RNA, 20 nt, Artificial Sequence
  targeting sequence with GTCN PAM
agaugugugacgggagccac

SEQ ID NO: 11702 - RNA, 20 nt, Artificial Sequence
  targeting sequence with GTCN PAM
cacaucuggacacagagaag

SEQ ID NO: 11703 - RNA, 20 nt, Artificial Sequence
  targeting sequence with GTCN PAM
ugcaauagcggaggguggag

SEQ ID NO: 11704 - RNA, 20 nt, Artificial Sequence
  targeting sequence with GTCN PAM
gcggcacagugguucuggug

SEQ ID NO: 11705 - RNA, 20 nt, Artificial Sequence
  targeting sequence with GTCN PAM
cggccaccagaaccacugug

SEQ ID NO: 11706 - RNA, 20 nt, Artificial Sequence
  targeting sequence with GTCN PAM
gucagcuucgucugcugcgg

SEQ ID NO: 11707 - RNA, 20 nt, Artificial Sequence
  targeting sequence with GTCN PAM
gcuucgucugcugcggugca

SEQ ID NO: 11708 - RNA, 20 nt, Artificial Sequence
  targeting sequence with GTCN PAM
gcugcggugcagguggccug

SEQ ID NO: 11709 - RNA, 20 nt, Artificial Sequence
  targeting sequence with GTCN PAM
gucaaggccagcaucccagg

SEQ ID NO: 11710 - RNA, 20 nt, Artificial Sequence
  targeting sequence with GTCN PAM
aggccagcaucccagggcca

SEQ ID NO: 11711 - RNA, 20 nt, Artificial Sequence
  targeting sequence with GTCN PAM
caucgagguggcccugggau

SEQ ID NO: 11712 - RNA, 20 nt, Artificial Sequence
  targeting sequence with GTCN PAM
cuggagaggugauagggguc

SEQ ID NO: 11713 - RNA, 20 nt, Artificial Sequence
  targeting sequence with GTCN PAM
ucagagaaggagagcugcag

SEQ ID NO: 11714 - RNA, 20 nt, Artificial Sequence
  targeting sequence with GTCN PAM
gcagggcgggguguggcagc

SEQ ID NO: 11715 - RNA, 20 nt, Artificial Sequence
  targeting sequence with GTCN PAM
ccacccgcugccacaccccg

SEQ ID NO: 11716 - RNA, 20 nt, Artificial Sequence
  targeting sequence with GTCN PAM
uuaaaagccaugccucucuc

SEQ ID NO: 11717 - RNA, 20 nt, Artificial Sequence
  targeting sequence with GTCN PAM
cauaccaagcugagcucagc

SEQ ID NO: 11718 - RNA, 20 nt, Artificial Sequence
  targeting sequence with GTCN PAM
ugcaaucccccuaagcuuua

SEQ ID NO: 11719 - RNA, 20 nt, Artificial Sequence
  targeting sequence with GTCN PAM
uuuucauuucaaaugaggaa

SEQ ID NO: 11720 - RNA, 20 nt, Artificial Sequence
  targeting sequence with GTCN PAM
aggcacagcugcaccuggca

SEQ ID NO: 11721 - RNA, 20 nt, Artificial Sequence
  targeting sequence with GTCN PAM
cugguggugcccgcuguggg

SEQ ID NO: 11722 - RNA, 20 nt, Artificial Sequence
  targeting sequence with GTCN PAM
gaaauaaagccuuccugggc

SEQ ID NO: 11723 - RNA, 20 nt, Artificial Sequence
  targeting sequence with GTCN PAM
guucucugaauagcacccag

SEQ ID NO: 11724 - RNA, 20 nt, Artificial Sequence
  targeting sequence with GTCN PAM
guuuugcccacuguggcacc

SEQ ID NO: 11725 - RNA, 20 nt, Artificial Sequence
  targeting sequence with GTCN PAM
cuaaggugacagaagguggu

SEQ ID NO: 11726 - RNA, 20 nt, Artificial Sequence
  targeting sequence with GTCN PAM
ccuuagugaccagcugggcc

SEQ ID NO: 11727 - RNA, 20 nt, Artificial Sequence
  targeting sequence with GTCN PAM
ccugcugggauggccccagg

SEQ ID NO: 11728 - RNA, 20 nt, Artificial Sequence
  targeting sequence with GTCN PAM
aggucacacagcaguagaac

SEQ ID NO: 11729 - RNA, 20 nt, Artificial Sequence
  targeting sequence with GTCN PAM
cacagcaguagaacccaacu

SEQ ID NO: 11730 - RNA, 20 nt, Artificial Sequence
  targeting sequence with GTCN PAM
ugcccucaucugcaaggaug

SEQ ID NO: 11731 - RNA, 20 nt, Artificial Sequence
  targeting sequence with GTCN PAM
ucacccuccucugagcuccc

SEQ ID NO: 11732 - RNA, 20 nt, Artificial Sequence
  targeting sequence with GTCN PAM
cccuggucugugauugggag

SEQ ID NO: 11733 - RNA, 20 nt, Artificial Sequence
  targeting sequence with GTCN PAM
gugauugggagcagugagcc

SEQ ID NO: 11734 - RNA, 20 nt, Artificial Sequence
  targeting sequence with GTCN PAM
gccaagugauuaucucuacu

SEQ ID NO: 11735 - RNA, 20 nt, Artificial Sequence
  targeting sequence with GTCN PAM
ugcaggaacagaagagaggc

SEQ ID NO: 11736 - RNA, 20 nt, Artificial Sequence
  targeting sequence with GTCN PAM
accacuuuggggguccugca

SEQ ID NO: 11737 - RNA, 20 nt, Artificial Sequence
  targeting sequence with GTCN PAM
ccgcagaaacggcaucaaga

SEQ ID NO: 11738 - RNA, 20 nt, Artificial Sequence
  targeting sequence with GTCN PAM
cccaggcuggaguacagugg

SEQ ID NO: 11739 - RNA, 20 nt, Artificial Sequence
  targeting sequence with GTCN PAM
ugauugagccacuguacucc

SEQ ID NO: 11740 - RNA, 20 nt, Artificial Sequence
  targeting sequence with GTCN PAM
gccauguaccaucuuaguga

SEQ ID NO: 11741 - RNA, 20 nt, Artificial Sequence
  targeting sequence with GTCN PAM
cuaagaugguacauggcaga

SEQ ID NO: 11742 - RNA, 20 nt, Artificial Sequence
  targeting sequence with GTCN PAM
aagucacuaagaugguacau

SEQ ID NO: 11743 - RNA, 20 nt, Artificial Sequence
  targeting sequence with GTCN PAM
cuucacaccuacaccuccag

SEQ ID NO: 11744 - RNA, 20 nt, Artificial Sequence
  targeting sequence with GTCN PAM
caccagcaacucauuaacuc

SEQ ID NO: 11745 - RNA, 20 nt, Artificial Sequence
  targeting sequence with GTCN PAM
uggccccuccugugggcuuc

SEQ ID NO: 11746 - RNA, 20 nt, Artificial Sequence
  targeting sequence with GTCN PAM
ccagcaucaugaaagaggcu

SEQ ID NO: 11747 - RNA, 20 nt, Artificial Sequence
  targeting sequence with GTCN PAM
gggcugcagagggaagacag

SEQ ID NO: 11748 - RNA, 20 nt, Artificial Sequence
  targeting sequence with GTCN PAM
ccuucacagugagggcuucc

SEQ ID NO: 11749 - RNA, 20 nt, Artificial Sequence
  targeting sequence with GTCN PAM
ugaagaagguaagggaggga

SEQ ID NO: 11750 - RNA, 20 nt, Artificial Sequence
  targeting sequence with GTCN PAM
ccaaccucaccuccuccauc

SEQ ID NO: 11751 - RNA, 20 nt, Artificial Sequence
  targeting sequence with GTCN PAM
gcggguacguaccucagugc

SEQ ID NO: 11752 - RNA, 20 nt, Artificial Sequence
  targeting sequence with GTCN PAM
acgcaggcaaggcgagcgac

SEQ ID NO: 11753 - RNA, 20 nt, Artificial Sequence
  targeting sequence with GTCN PAM
aaugggcgugcucuuucccu

SEQ ID NO: 11754 - RNA, 20 nt, Artificial Sequence
  targeting sequence with GTCN PAM
ugggagcccgcucgcaagga

SEQ ID NO: 11755 - RNA, 20 nt, Artificial Sequence
  targeting sequence with GTCN PAM
agcagagggcgcgcuaaccc

SEQ ID NO: 11756 - RNA, 20 nt, Artificial Sequence
  targeting sequence with GTCN PAM
uucaucguccagcagagggc

SEQ ID NO: 11757 - RNA, 20 nt, Artificial Sequence
  targeting sequence with GTCN PAM
ucgcccgcauuucacaggcg

SEQ ID NO: 11758 - RNA, 20 nt, Artificial Sequence
  targeting sequence with GTCN PAM
cggcggggaggggagucauc

SEQ ID NO: 11759 - RNA, 20 nt, Artificial Sequence
  targeting sequence with GTCN PAM
gcggcugggcucggacccgg

SEQ ID NO: 11760 - RNA, 20 nt, Artificial Sequence
  targeting sequence with GTCN PAM
ugcagggccucgugggccgc

SEQ ID NO: 11761 - RNA, 20 nt, Artificial Sequence
  targeting sequence with GTCN PAM
ccaggccuggccuccuuggg

SEQ ID NO: 11762 - RNA, 20 nt, Artificial Sequence
  targeting sequence with GTCN PAM
ugaucagguuaccucaguuu

SEQ ID NO: 11763 - RNA, 20 nt, Artificial Sequence
  targeting sequence with GTCN PAM
acccagcucaaccccacagu

SEQ ID NO: 11764 - RNA, 20 nt, Artificial Sequence
  targeting sequence with GTCN PAM
aagccuuggcuggggcccag

SEQ ID NO: 11765 - RNA, 20 nt, Artificial Sequence
  targeting sequence with GTCN PAM
guugaagcgagccgccucca

SEQ ID NO: 11766 - RNA, 20 nt, Artificial Sequence
  targeting sequence with GTCN PAM
cuggccugcacacccccggg

SEQ ID NO: 11767 - RNA, 20 nt, Artificial Sequence
  targeting sequence with GTCN PAM
gccauggcugccuggccagu

SEQ ID NO: 11768 - RNA, 20 nt, Artificial Sequence
  targeting sequence with GTCN PAM
ucucgucagccauggcugcc

SEQ ID NO: 11769 - RNA, 20 nt, Artificial Sequence
  targeting sequence with GTCN PAM
acggcaccuucuaugccaug

SEQ ID NO: 11770 - RNA, 20 nt, Artificial Sequence
  targeting sequence with GTCN PAM
uggugaucgggggcaucauc

SEQ ID NO: 11771 - RNA, 20 nt, Artificial Sequence
  targeting sequence with GTCN PAM
gcuggggccaggagggcugg

SEQ ID NO: 11772 - RNA, 20 nt, Artificial Sequence
  targeting sequence with GTCN PAM
ugaguucuaguucaaguccu

SEQ ID NO: 11773 - RNA, 20 nt, Artificial Sequence
  targeting sequence with GTCN PAM
uguuccaaacucucuaugac

SEQ ID NO: 11774 - RNA, 20 nt, Artificial Sequence
  targeting sequence with GTCN PAM
uagagaguuuggaacaggac

SEQ ID NO: 11775 - RNA, 20 nt, Artificial Sequence
  targeting sequence with GTCN PAM
cccagccucucuaggcauug

SEQ ID NO: 11776 - RNA, 20 nt, Artificial Sequence
  targeting sequence with GTCN PAM
cacagcuggucagguacaga

SEQ ID NO: 11777 - RNA, 20 nt, Artificial Sequence
  targeting sequence with GTCN PAM
gguacagacccagggagaaa

SEQ ID NO: 11778 - RNA, 20 nt, Artificial Sequence
  targeting sequence with GTCN PAM
guaccugaccagcuguguga

SEQ ID NO: 11779 - RNA, 20 nt, Artificial Sequence
  targeting sequence with GTCN PAM
uucuguucagugcuggagcg

SEQ ID NO: 11780 - RNA, 20 nt, Artificial Sequence
  targeting sequence with GTCN PAM
gggcugguuuguagucauuu

SEQ ID NO: 11781 - RNA, 20 nt, Artificial Sequence
  targeting sequence with GTCN PAM
uuuagcaggcaguuuacagu

SEQ ID NO: 11782 - RNA, 20 nt, Artificial Sequence
  targeting sequence with GTCN PAM
acuugccucugucugugcaa

SEQ ID NO: 11783 - RNA, 20 nt, Artificial Sequence
  targeting sequence with GTCN PAM
gugcaauuccuugagcagag

SEQ ID NO: 11784 - RNA, 20 nt, Artificial Sequence
  targeting sequence with GTCN PAM
cugggagaaguccuuggggc

SEQ ID NO: 11785 - RNA, 20 nt, Artificial Sequence
  targeting sequence with GTCN PAM
uuggggccaaagccacucau

SEQ ID NO: 11786 - RNA, 20 nt, Artificial Sequence
  targeting sequence with GTCN PAM
ccacugcuauuauaauccuu

SEQ ID NO: 11787 - RNA, 20 nt, Artificial Sequence
  targeting sequence with GTCN PAM
cacuucugugaccuuggcag

SEQ ID NO: 11788 - RNA, 20 nt, Artificial Sequence
  targeting sequence with GTCN PAM
cagaagugggacaugaagga

SEQ ID NO: 11789 - RNA, 20 nt, Artificial Sequence
  targeting sequence with GTCN PAM
cucccccucagcucugagcc

SEQ ID NO: 11790 - RNA, 20 nt, Artificial Sequence
  targeting sequence with GTCN PAM
uuccccaucuucucugcuug

SEQ ID NO: 11791 - RNA, 20 nt, Artificial Sequence
  targeting sequence with GTCN PAM
uggugagagcugacagucau

SEQ ID NO: 11792 - RNA, 20 nt, Artificial Sequence
  targeting sequence with GTCN PAM
gcucucaccaagaccagaga

SEQ ID NO: 11793 - RNA, 20 nt, Artificial Sequence
  targeting sequence with GTCN PAM
ucuggaauaaugcagaauuc

SEQ ID NO: 11794 - RNA, 20 nt, Artificial Sequence
  targeting sequence with GTCN PAM
gaaguuccauccuuaaggcu

SEQ ID NO: 11795 - RNA, 20 nt, Artificial Sequence
  targeting sequence with GTCN PAM
auccauaugaugaaauacua

SEQ ID NO: 11796 - RNA, 20 nt, Artificial Sequence
  targeting sequence with GTCN PAM
ccucagggaauuggcaaacc

SEQ ID NO: 11797 - RNA, 20 nt, Artificial Sequence
  targeting sequence with GTCN PAM
acugcacagaggcugucucu

SEQ ID NO: 11798 - RNA, 20 nt, Artificial Sequence
  targeting sequence with GTCN PAM
cuccuuugcuugcagaucac

SEQ ID NO: 11799 - RNA, 20 nt, Artificial Sequence
  targeting sequence with GTCN PAM
cugcugacucugacuuucaa

SEQ ID NO: 11800 - RNA, 20 nt, Artificial Sequence
  targeting sequence with GTCN PAM
gcagggacgaaggugaucug

SEQ ID NO: 11801 - RNA, 20 nt, Artificial Sequence
  targeting sequence with GTCN PAM
gagucagcagggacgaaggu

SEQ ID NO: 11802 - RNA, 20 nt, Artificial Sequence
  targeting sequence with GTCN PAM
ccccugacugaggagaguga

SEQ ID NO: 11803 - RNA, 20 nt, Artificial Sequence
  targeting sequence with GTCN PAM
ggggagacuggccuaugggg

SEQ ID NO: 11804 - RNA, 20 nt, Artificial Sequence
  targeting sequence with GTCN PAM
cugggccucaguuuccucau

SEQ ID NO: 11805 - RNA, 20 nt, Artificial Sequence
  targeting sequence with GTCN PAM
ugucagggacgagacagugu

SEQ ID NO: 11806 - RNA, 20 nt, Artificial Sequence
  targeting sequence with GTCN PAM
gggacgagacaguguuucgg

SEQ ID NO: 11807 - RNA, 20 nt, Artificial Sequence
  targeting sequence with GTCN PAM
cugacaagacaaagucccug

SEQ ID NO: 11808 - RNA, 20 nt, Artificial Sequence
  targeting sequence with GTCN PAM
cgucccugacaagacaaagu

SEQ ID NO: 11809 - RNA, 20 nt, Artificial Sequence
  targeting sequence with GTCN PAM
cuagccccaaaccucauggg

SEQ ID NO: 11810 - RNA, 20 nt, Artificial Sequence
  targeting sequence with GTCN PAM
ccagccgcccuauguaaggc

SEQ ID NO: 11811 - RNA, 20 nt, Artificial Sequence
  targeting sequence with GTCN PAM
uaggcggcuuccucccacag

SEQ ID NO: 11812 - RNA, 20 nt, Artificial Sequence
  targeting sequence with GTCN PAM
ggcaggcucuggucauaggc

SEQ ID NO: 11813 - RNA, 20 nt, Artificial Sequence
  targeting sequence with GTCN PAM
ugagcuacagugaggaccac

SEQ ID NO: 11814 - RNA, 20 nt, Artificial Sequence
  targeting sequence with GTCN PAM
ucacuguagcucaugacuuu

SEQ ID NO: 11815 - RNA, 20 nt, Artificial Sequence
  targeting sequence with GTCN PAM
ccagggccaccuucuccucc

SEQ ID NO: 11816 - RNA, 20 nt, Artificial Sequence
  targeting sequence with GTCN PAM
uccacaagggcucagacgag

SEQ ID NO: 11817 - RNA, 20 nt, Artificial Sequence
  targeting sequence with GTCN PAM
gagcccuuguggaugaccac

SEQ ID NO: 11818 - RNA, 20 nt, Artificial Sequence
  targeting sequence with GTCN PAM
uuccccuucacucucgucug

SEQ ID NO: 11819 - RNA, 20 nt, Artificial Sequence
  targeting sequence with GTCN PAM
cacacccuccacugcccucu

SEQ ID NO: 11820 - RNA, 20 nt, Artificial Sequence
  targeting sequence with GTCN PAM
gccacaucugccacaucuca

SEQ ID NO: 11821 - RNA, 20 nt, Artificial Sequence
  targeting sequence with GTCN PAM
ggccucaguucaaaccccag

SEQ ID NO: 11822 - RNA, 20 nt, Artificial Sequence
  targeting sequence with GTCN PAM
caacccucaacauuccuggg

SEQ ID NO: 11823 - RNA, 20 nt, Artificial Sequence
  targeting sequence with GTCN PAM
cugaaugcuugucgugagua

SEQ ID NO: 11824 - RNA, 20 nt, Artificial Sequence
  targeting sequence with GTCN PAM
ugaguagcagggggccagga

SEQ ID NO: 11825 - RNA, 20 nt, Artificial Sequence
  targeting sequence with GTCN PAM
ucuggcuccuggcccccugc

SEQ ID NO: 11826 - RNA, 20 nt, Artificial Sequence
  targeting sequence with GTCN PAM
gcugcugaccugcucuguga

SEQ ID NO: 11827 - RNA, 20 nt, Artificial Sequence
  targeting sequence with GTCN PAM
gcagcagacccaaauuugaa

SEQ ID NO: 11828 - RNA, 20 nt, Artificial Sequence
  targeting sequence with GTCN PAM
cagagcaggucagcagcaga

SEQ ID NO: 11829 - RNA, 20 nt, Artificial Sequence
  targeting sequence with GTCN PAM
guuugugaacugagcuccuu

SEQ ID NO: 11830 - RNA, 20 nt, Artificial Sequence
  targeting sequence with GTCN PAM
aaugagggaggcaaagacac

SEQ ID NO: 11831 - RNA, 20 nt, Artificial Sequence
  targeting sequence with GTCN PAM
uugccucccucauuggacuc

SEQ ID NO: 11832 - RNA, 20 nt, Artificial Sequence
  targeting sequence with GTCN PAM
ccgggugucuuugccucccu

SEQ ID NO: 11833 - RNA, 20 nt, Artificial Sequence
  targeting sequence with GTCN PAM
cucaucuacuucuccaauua

SEQ ID NO: 11834 - RNA, 20 nt, Artificial Sequence
  targeting sequence with GTCN PAM
ugcagcuagcggcuggaaug

SEQ ID NO: 11835 - RNA, 20 nt, Artificial Sequence
  targeting sequence with GTCN PAM
acauuccagccgcuagcugc

SEQ ID NO: 11836 - RNA, 20 nt, Artificial Sequence
  targeting sequence with GTCN PAM
gaaugccuggguccacauuc

SEQ ID NO: 11837 - RNA, 20 nt, Artificial Sequence
  targeting sequence with GTCN PAM
uugucccugcagcccccugg

SEQ ID NO: 11838 - RNA, 20 nt, Artificial Sequence
  targeting sequence with GTCN PAM
cugcagcccccuggccuguc

SEQ ID NO: 11839 - RNA, 20 nt, Artificial Sequence
  targeting sequence with GTCN PAM
ccagggcccugcccccuugg

SEQ ID NO: 11840 - RNA, 20 nt, Artificial Sequence
  targeting sequence with GTCN PAM
ucuuggaaggaagccaaggg

SEQ ID NO: 11841 - RNA, 20 nt, Artificial Sequence
  targeting sequence with GTCN PAM
aggucaucuuggaaggaagc

SEQ ID NO: 11842 - RNA, 20 nt, Artificial Sequence
  targeting sequence with GTCN PAM
auguccaggucaucuuggaa

SEQ ID NO: 11843 - RNA, 20 nt, Artificial Sequence
  targeting sequence with GTCN PAM
uguggagaugcauuggggcu

SEQ ID NO: 11844 - RNA, 20 nt, Artificial Sequence
  targeting sequence with GTCN PAM
agcgggcaccugcagcccug

SEQ ID NO: 11845 - RNA, 20 nt, Artificial Sequence
  targeting sequence with GTCN PAM
uggaagcgguccagcgggca

SEQ ID NO: 11846 - RNA, 20 nt, Artificial Sequence
  targeting sequence with GTCN PAM
uuggguaccgcugccaguug

SEQ ID NO: 11847 - RNA, 20 nt, Artificial Sequence
  targeting sequence with GTCN PAM
gaagccuccuucuccuccac

SEQ ID NO: 11848 - RNA, 20 nt, Artificial Sequence
  targeting sequence with GTCN PAM
uccucuuccuucucagguuc

SEQ ID NO: 11849 - RNA, 20 nt, Artificial Sequence
  targeting sequence with GTCN PAM
ccggcuccaucuggcagccc

SEQ ID NO: 11850 - RNA, 20 nt, Artificial Sequence
  targeting sequence with GTCN PAM
gggaggagguccccggcucc

SEQ ID NO: 11851 - RNA, 20 nt, Artificial Sequence
  targeting sequence with GTCN PAM
ggcucaaaacccagcuccuu

SEQ ID NO: 11852 - RNA, 20 nt, Artificial Sequence
  targeting sequence with GTCN PAM
ggaacugcugcugaccccug

SEQ ID NO: 11853 - RNA, 20 nt, Artificial Sequence
  targeting sequence with GTCN PAM
uuggccaaccuuugaaggca

SEQ ID NO: 11854 - RNA, 20 nt, Artificial Sequence
  targeting sequence with GTCN PAM
gcuuugggggaagguggaaa

SEQ ID NO: 11855 - RNA, 20 nt, Artificial Sequence
  targeting sequence with GTCN PAM
ugguuugagguaguguuacu

SEQ ID NO: 11856 - RNA, 20 nt, Artificial Sequence
  targeting sequence with GTCN PAM
gagaccuucaccugggcuau

SEQ ID NO: 11857 - RNA, 20 nt, Artificial Sequence
  targeting sequence with GTCN PAM
cugacucccagguggcccag

SEQ ID NO: 11858 - RNA, 20 nt, Artificial Sequence
  targeting sequence with GTCN PAM
uggccuagggaaggagaugc

SEQ ID NO: 11859 - RNA, 20 nt, Artificial Sequence
  targeting sequence with GTCN PAM
uggcccugggaacacacuuc

SEQ ID NO: 11860 - RNA, 20 nt, Artificial Sequence
  targeting sequence with GTCN PAM
uuucugccucugcagugaag

SEQ ID NO: 11861 - RNA, 20 nt, Artificial Sequence
  targeting sequence with GTCN PAM
ugacucaggacaggaguucc

SEQ ID NO: 11862 - RNA, 20 nt, Artificial Sequence
  targeting sequence with GTCN PAM
ugacagcagagaggguguac

SEQ ID NO: 11863 - RNA, 20 nt, Artificial Sequence
  targeting sequence with GTCN PAM
ugagucaugacagcagagag

SEQ ID NO: 11864 - RNA, 20 nt, Artificial Sequence
  targeting sequence with GTCN PAM
cagcugagucuucggaugag

SEQ ID NO: 11865 - RNA, 20 nt, Artificial Sequence
  targeting sequence with GTCN PAM
ucggaugaggugagggguag

SEQ ID NO: 11866 - RNA, 20 nt, Artificial Sequence
  targeting sequence with GTCN PAM
gcacuaagggcuaaaauaaa

SEQ ID NO: 11867 - RNA, 20 nt, Artificial Sequence
  targeting sequence with GTCN PAM
ucuucauucaccugcaaauu

SEQ ID NO: 11868 - RNA, 20 nt, Artificial Sequence
  targeting sequence with GTCN PAM
ggcguaaggccucacguauc

SEQ ID NO: 11869 - RNA, 20 nt, Artificial Sequence
  targeting sequence with GTCN PAM
ugccacugcagugagggcuu

SEQ ID NO: 11870 - RNA, 20 nt, Artificial Sequence
  targeting sequence with GTCN PAM
aaagccacugcgguuguggu

SEQ ID NO: 11871 - RNA, 20 nt, Artificial Sequence
  targeting sequence with GTCN PAM
caccaucucacuccacuacc

SEQ ID NO: 11872 - RNA, 20 nt, Artificial Sequence
  targeting sequence with GTCN PAM
cccuggcucuugcugcauga

SEQ ID NO: 11873 - RNA, 20 nt, Artificial Sequence
  targeting sequence with GTCN PAM
ccccaucaugcagcaagagc

SEQ ID NO: 11874 - RNA, 20 nt, Artificial Sequence
  targeting sequence with GTCN PAM
cgguugacaccgacugccuc

SEQ ID NO: 11875 - RNA, 20 nt, Artificial Sequence
  targeting sequence with GTCN PAM
accgggaccuuccugggcag

SEQ ID NO: 11876 - RNA, 20 nt, Artificial Sequence
  targeting sequence with GTCN PAM
gugucaaccgggaccuuccu

SEQ ID NO: 11877 - RNA, 20 nt, Artificial Sequence
  targeting sequence with GTCN PAM
cagaguagguaagguaacau

SEQ ID NO: 11878 - RNA, 20 nt, Artificial Sequence
  targeting sequence with GTCN PAM
aaggucacagaguagguaag

SEQ ID NO: 11879 - RNA, 20 nt, Artificial Sequence
  targeting sequence with GTCN PAM
gguugccuccguagcccuca

SEQ ID NO: 11880 - RNA, 20 nt, Artificial Sequence
  targeting sequence with GTCN PAM
uuugcacaugagaaagcuga

SEQ ID NO: 11881 - RNA, 20 nt, Artificial Sequence
  targeting sequence with GTCN PAM
caucaaacacccccaucacu

SEQ ID NO: 11882 - RNA, 20 nt, Artificial Sequence
  targeting sequence with GTCN PAM
augcccugcagccaaagacc

SEQ ID NO: 11883 - RNA, 20 nt, Artificial Sequence
  targeting sequence with GTCN PAM
uuggcugcagggcauugaca

SEQ ID NO: 11884 - RNA, 20 nt, Artificial Sequence
  targeting sequence with GTCN PAM
cugaaagagguauuagaaag

SEQ ID NO: 11885 - RNA, 20 nt, Artificial Sequence
  targeting sequence with GTCN PAM
cucuccugucagguuggagg

SEQ ID NO: 11886 - RNA, 20 nt, Artificial Sequence
  targeting sequence with GTCN PAM
gguuggagggacucuggaag

SEQ ID NO: 11887 - RNA, 20 nt, Artificial Sequence
  targeting sequence with GTCN PAM
cuccaaccugacaggagagu

SEQ ID NO: 11888 - RNA, 20 nt, Artificial Sequence
  targeting sequence with GTCN PAM
gcagagcccagguucccugc

SEQ ID NO: 11889 - RNA, 20 nt, Artificial Sequence
  targeting sequence with GTCN PAM
uggcgagcggucggcagagc

SEQ ID NO: 11890 - RNA, 20 nt, Artificial Sequence
  targeting sequence with GTCN PAM
accccacauugcaaauguuu

SEQ ID NO: 11891 - RNA, 20 nt, Artificial Sequence
  targeting sequence with GTCN PAM
acagaucggucccccagggc

SEQ ID NO: 11892 - RNA, 20 nt, Artificial Sequence
  targeting sequence with GTCN PAM
uucugauucuggagccuggg

SEQ ID NO: 11893 - RNA, 20 nt, Artificial Sequence
  targeting sequence with GTCN PAM
acauuuaugcaguggggagg

SEQ ID NO: 11894 - RNA, 20 nt, Artificial Sequence
  targeting sequence with GTCN PAM
cccuccacacuagcacaggg

SEQ ID NO: 11895 - RNA, 20 nt, Artificial Sequence
  targeting sequence with GTCN PAM
uggaagauguugcagggggg

SEQ ID NO: 11896 - RNA, 20 nt, Artificial Sequence
  targeting sequence with GTCN PAM
cuucccccaguaccuagcac

SEQ ID NO: 11897 - RNA, 20 nt, Artificial Sequence
  targeting sequence with GTCN PAM
gaugcaugucucuuccccca

SEQ ID NO: 11898 - RNA, 20 nt, Artificial Sequence
  targeting sequence with GTCN PAM
ugggggaaccucuacuaccc

SEQ ID NO: 11899 - RNA, 20 nt, Artificial Sequence
  targeting sequence with GTCN PAM
gaaagagcucuguuccucca

SEQ ID NO: 11900 - RNA, 20 nt, Artificial Sequence
  targeting sequence with GTCN PAM
auauauuuugauguggacag

SEQ ID NO: 11901 - RNA, 20 nt, Artificial Sequence
  targeting sequence with GTCN PAM
acaucaaaauauauagacuc

SEQ ID NO: 11902 - RNA, 20 nt, Artificial Sequence
  targeting sequence with GTCN PAM
guuacagcaugcaugcuguu

SEQ ID NO: 11903 - RNA, 20 nt, Artificial Sequence
  targeting sequence with GTCN PAM
ucacucacaaacaaaaucaa

SEQ ID NO: 11904 - RNA, 20 nt, Artificial Sequence
  targeting sequence with GTCN PAM
augaauugugauugguccaa

SEQ ID NO: 11905 - RNA, 20 nt, Artificial Sequence
  targeting sequence with GTCN PAM
aaagccaaucaugacaaucc

SEQ ID NO: 11906 - RNA, 20 nt, Artificial Sequence
  targeting sequence with GTCN PAM
ugauuggcuuuggaccaauc

SEQ ID NO: 11907 - RNA, 20 nt, Artificial Sequence
  targeting sequence with GTCN PAM
ugagaucgaguucuggccag

SEQ ID NO: 11908 - RNA, 20 nt, Artificial Sequence
  targeting sequence with GTCN PAM
uacuggccagaacucgaucu

SEQ ID NO: 11909 - RNA, 20 nt, Artificial Sequence
  targeting sequence with GTCN PAM
cuuucugaaguuuuugcuuu

SEQ ID NO: 11910 - RNA, 20 nt, Artificial Sequence
  targeting sequence with GTCN PAM
cuucugcauuuuuauuauaa

SEQ ID NO: 11911 - RNA, 20 nt, Artificial Sequence
  targeting sequence with GTCN PAM
ugcagucaugagggaaauuc

SEQ ID NO: 11912 - RNA, 20 nt, Artificial Sequence
  targeting sequence with GTCN PAM
ugagggaaauuccaagagau

SEQ ID NO: 11913 - RNA, 20 nt, Artificial Sequence
  targeting sequence with GTCN PAM
agcaucucugugaaucucuu

SEQ ID NO: 11914 - RNA, 20 nt, Artificial Sequence
  targeting sequence with GTCN PAM
cguggcaccuguauuggcua

SEQ ID NO: 11915 - RNA, 20 nt, Artificial Sequence
  targeting sequence with GTCN PAM
ucugcaugaaaaugaccuug

SEQ ID NO: 11916 - RNA, 20 nt, Artificial Sequence
  targeting sequence with GTCN PAM
uuuucaugcagaugaccugg

SEQ ID NO: 11917 - RNA, 20 nt, Artificial Sequence
  targeting sequence with GTCN PAM
ccacgagguccccaggccug

SEQ ID NO: 11918 - RNA, 20 nt, Artificial Sequence
  targeting sequence with GTCN PAM
gaucuccaaaacccagccca

SEQ ID NO: 11919 - RNA, 20 nt, Artificial Sequence
  targeting sequence with GTCN PAM
gccaucucagccagggagga

SEQ ID NO: 11920 - RNA, 20 nt, Artificial Sequence
  targeting sequence with GTCN PAM
ggguguuaauggugcagaga

SEQ ID NO: 11921 - RNA, 20 nt, Artificial Sequence
  targeting sequence with GTCN PAM
ccaccuccacuugcccuggg

SEQ ID NO: 11922 - RNA, 20 nt, Artificial Sequence
  targeting sequence with GTCN PAM
agggugaaaggaaagaaucc

SEQ ID NO: 11923 - RNA, 20 nt, Artificial Sequence
  targeting sequence with GTCN PAM
uuuggauccaaauggccagu

SEQ ID NO: 11924 - RNA, 20 nt, Artificial Sequence
  targeting sequence with GTCN PAM
gggugacccaguuggguauu

SEQ ID NO: 11925 - RNA, 20 nt, Artificial Sequence
  targeting sequence with GTCN PAM
ccccgacuggccauuuggau

SEQ ID NO: 11926 - RNA, 20 nt, Artificial Sequence
  targeting sequence with GTCN PAM
gauggcagccccacuccucc

SEQ ID NO: 11927 - RNA, 20 nt, Artificial Sequence
  targeting sequence with GTCN PAM
uuccucccccuccaugcuug

SEQ ID NO: 11928 - RNA, 20 nt, Artificial Sequence
  targeting sequence with GTCN PAM
ggacuuucuaaagcaguuuu

SEQ ID NO: 11929 - RNA, 20 nt, Artificial Sequence
  targeting sequence with GTCN PAM
ugacaugaggcaagcaugga

SEQ ID NO: 11930 - RNA, 20 nt, Artificial Sequence
  targeting sequence with GTCN PAM
aacaagauagcacaucuaaa

SEQ ID NO: 11931 - RNA, 20 nt, Artificial Sequence
  targeting sequence with GTCN PAM
caccgugaauuuguagcaga

SEQ ID NO: 11932 - RNA, 20 nt, Artificial Sequence
  targeting sequence with GTCN PAM
ugucccaucugcugccaagg

SEQ ID NO: 11933 - RNA, 20 nt, Artificial Sequence
  targeting sequence with GTCN PAM
caucugcugccaaggccuag

SEQ ID NO: 11934 - RNA, 20 nt, Artificial Sequence
  targeting sequence with GTCN PAM
ccaccccuccagccugugcu

SEQ ID NO: 11935 - RNA, 20 nt, Artificial Sequence
  targeting sequence with GTCN PAM
ccaggcuggaccccaccaca

SEQ ID NO: 11936 - RNA, 20 nt, Artificial Sequence
  targeting sequence with GTCN PAM
agccuggagacaguacccug

SEQ ID NO: 11937 - RNA, 20 nt, Artificial Sequence
  targeting sequence with GTCN PAM
ggagagagugguuuuagagc

SEQ ID NO: 11938 - RNA, 20 nt, Artificial Sequence
  targeting sequence with GTCN PAM
aauucgcuuuggucuggaga

SEQ ID NO: 11939 - RNA, 20 nt, Artificial Sequence
  targeting sequence with GTCN PAM
cagcuguaggagcuccuggu

SEQ ID NO: 11940 - RNA, 20 nt, Artificial Sequence
  targeting sequence with GTCN PAM
agcagaagagauugucacau

SEQ ID NO: 11941 - RNA, 20 nt, Artificial Sequence
  targeting sequence with GTCN PAM
cauagaggacucccuuggca

SEQ ID NO: 11942 - RNA, 20 nt, Artificial Sequence
  targeting sequence with GTCN PAM
ucuaugugacaaucucuucu

SEQ ID NO: 11943 - RNA, 20 nt, Artificial Sequence
  targeting sequence with GTCN PAM
ccuccuccaggcagcacucc

SEQ ID NO: 11944 - RNA, 20 nt, Artificial Sequence
  targeting sequence with GTCN PAM
ugagaauuaucaggcaaaga

SEQ ID NO: 11945 - RNA, 20 nt, Artificial Sequence
  targeting sequence with GTCN PAM
cccagcuccacucugcagcc

SEQ ID NO: 11946 - RNA, 20 nt, Artificial Sequence
  targeting sequence with GTCN PAM
aggucacccagcuccacucu

SEQ ID NO: 11947 - RNA, 20 nt, Artificial Sequence
  targeting sequence with GTCN PAM
ugcuaguguuucuccaagca

SEQ ID NO: 11948 - RNA, 20 nt, Artificial Sequence
  targeting sequence with GTCN PAM
aaggccaccucaguccugcu

SEQ ID NO: 11949 - RNA, 20 nt, Artificial Sequence
  targeting sequence with GTCN PAM
gggguggaggcagaggugga

SEQ ID NO: 11950 - RNA, 20 nt, Artificial Sequence
  targeting sequence with GTCN PAM
agcuucugcagcucuuccua

SEQ ID NO: 11951 - RNA, 20 nt, Artificial Sequence
  targeting sequence with GTCN PAM
aagaggguccagcuucugca

SEQ ID NO: 11952 - RNA, 20 nt, Artificial Sequence
  targeting sequence with GTCN PAM
ccacugacacauuuuauccu

SEQ ID NO: 11953 - RNA, 20 nt, Artificial Sequence
  targeting sequence with GTCN PAM
guggggacaggggaugggca

SEQ ID NO: 11954 - RNA, 20 nt, Artificial Sequence
  targeting sequence with GTCN PAM
aucuuguucacugcuguacc

SEQ ID NO: 11955 - RNA, 20 nt, Artificial Sequence
  targeting sequence with GTCN PAM
guaacauggaaggugaucaa

SEQ ID NO: 11956 - RNA, 20 nt, Artificial Sequence
  targeting sequence with GTCN PAM
cccucuugucacccaggaug

SEQ ID NO: 11957 - RNA, 20 nt, Artificial Sequence
  targeting sequence with GTCN PAM
cccaggaugaagugcaaugg

SEQ ID NO: 11958 - RNA, 20 nt, Artificial Sequence
  targeting sequence with GTCN PAM
cuacuaaaaacacaaaauua

SEQ ID NO: 11959 - RNA, 20 nt, Artificial Sequence
  targeting sequence with GTCN PAM
ggcuggucuugaacuccuga

SEQ ID NO: 11960 - RNA, 20 nt, Artificial Sequence
  targeting sequence with GTCN PAM
ugaacuccugacuucaggug

SEQ ID NO: 11961 - RNA, 20 nt, Artificial Sequence
  targeting sequence with GTCN PAM
ggaguucaagaccagccuga

SEQ ID NO: 11962 - RNA, 20 nt, Artificial Sequence
  targeting sequence with GTCN PAM
cucuuuuguacacaucaagg

SEQ ID NO: 11963 - RNA, 20 nt, Artificial Sequence
  targeting sequence with GTCN PAM
gccuggcucucucugucucu

SEQ ID NO: 11964 - RNA, 20 nt, Artificial Sequence
  targeting sequence with GTCN PAM
gagaacagcaacagcucuuc

SEQ ID NO: 11965 - RNA, 20 nt, Artificial Sequence
  targeting sequence with GTCN PAM
ccacucccugccggcuuaaa

SEQ ID NO: 11966 - RNA, 20 nt, Artificial Sequence
  targeting sequence with GTCN PAM
uccuggcaccugccacaggc

SEQ ID NO: 11967 - RNA, 20 nt, Artificial Sequence
  targeting sequence with GTCN PAM
gccacuucauggagaaaagg

SEQ ID NO: 11968 - RNA, 20 nt, Artificial Sequence
  targeting sequence with GTCN PAM
ccacccucuccucuccuccc

SEQ ID NO: 11969 - RNA, 20 nt, Artificial Sequence
  targeting sequence with GTCN PAM
ugacccucuuuuguucagaa

SEQ ID NO: 11970 - RNA, 20 nt, Artificial Sequence
  targeting sequence with GTCN PAM
ugaccagcacgccggccuca

SEQ ID NO: 11971 - RNA, 20 nt, Artificial Sequence
  targeting sequence with GTCN PAM
ccuaaccucaggagagggcc

SEQ ID NO: 11972 - RNA, 20 nt, Artificial Sequence
  targeting sequence with GTCN PAM
ccagcugggccaugcacugc

SEQ ID NO: 11973 - RNA, 20 nt, Artificial Sequence
  targeting sequence with GTCN PAM
aguuauaauggugguaggaa

SEQ ID NO: 11974 - RNA, 20 nt, Artificial Sequence
  targeting sequence with GTCN PAM
gaugggcacugaauccgggc

SEQ ID NO: 11975 - RNA, 20 nt, Artificial Sequence
  targeting sequence with GTCN PAM
cuucugugagacuuggcucc

SEQ ID NO: 11976 - RNA, 20 nt, Artificial Sequence
  targeting sequence with GTCN PAM
cacagaagggacaggcuagg

SEQ ID NO: 11977 - RNA, 20 nt, Artificial Sequence
  targeting sequence with GTCN PAM
ccugugcucucaucugccuc

SEQ ID NO: 11978 - RNA, 20 nt, Artificial Sequence
  targeting sequence with GTCN PAM
acagggaggcagaugagagc

SEQ ID NO: 11979 - RNA, 20 nt, Artificial Sequence
  targeting sequence with GTCN PAM
ucugagcccacggccugccc

SEQ ID NO: 11980 - RNA, 20 nt, Artificial Sequence
  targeting sequence with GTCN PAM
agcugggcaaggcugcugcu

SEQ ID NO: 11981 - RNA, 20 nt, Artificial Sequence
  targeting sequence with GTCN PAM
cucucucccuauuccuuccu

SEQ ID NO: 11982 - RNA, 20 nt, Artificial Sequence
  targeting sequence with GTCN PAM
uccaaauccugcuccagcac

SEQ ID NO: 11983 - RNA, 20 nt, Artificial Sequence
  targeting sequence with GTCN PAM
cuuucuggccuugacuggaa

SEQ ID NO: 11984 - RNA, 20 nt, Artificial Sequence
  targeting sequence with GTCN PAM
aggccagaaagggaccgaaa

SEQ ID NO: 11985 - RNA, 20 nt, Artificial Sequence
  targeting sequence with GTCN PAM
cccaaggacacugcugccgu

SEQ ID NO: 11986 - RNA, 20 nt, Artificial Sequence
  targeting sequence with GTCN PAM
uugggggacaggggccuucc

SEQ ID NO: 11987 - RNA, 20 nt, Artificial Sequence
  targeting sequence with GTCN PAM
cugcaguccuuuccccccgc

SEQ ID NO: 11988 - RNA, 20 nt, Artificial Sequence
  targeting sequence with GTCN PAM
uuuccccccgccugagaggg

SEQ ID NO: 11989 - RNA, 20 nt, Artificial Sequence
  targeting sequence with GTCN PAM
ccuugcucucagugccccac

SEQ ID NO: 11990 - RNA, 20 nt, Artificial Sequence
  targeting sequence with GTCN PAM
uucucuccuccauaaacgca

SEQ ID NO: 11991 - RNA, 20 nt, Artificial Sequence
  targeting sequence with GTCN PAM
ugcgccacacagcaauguuu

SEQ ID NO: 11992 - RNA, 20 nt, Artificial Sequence
  targeting sequence with GTCN PAM
uugccugaaacauugcugug

SEQ ID NO: 11993 - RNA, 20 nt, Artificial Sequence
  targeting sequence with GTCN PAM
gucguugccugaaacauugc

SEQ ID NO: 11994 - RNA, 20 nt, Artificial Sequence
  targeting sequence with GTCN PAM
uguauguggucugucguugc

SEQ ID NO: 11995 - RNA, 20 nt, Artificial Sequence
  targeting sequence with GTCN PAM
ccucgcuuagagacgucaua

SEQ ID NO: 11996 - RNA, 20 nt, Artificial Sequence
  targeting sequence with GTCN PAM
cuaagcgaggugacaggagu

SEQ ID NO: 11997 - RNA, 20 nt, Artificial Sequence
  targeting sequence with GTCN PAM
uagcugucaggccucugagc

SEQ ID NO: 11998 - RNA, 20 nt, Artificial Sequence
  targeting sequence with GTCN PAM
ggccucugagcccaagccaa

SEQ ID NO: 11999 - RNA, 20 nt, Artificial Sequence
  targeting sequence with GTCN PAM
caggggaugcgauggcuugg

SEQ ID NO: 12000 - RNA, 20 nt, Artificial Sequence
  targeting sequence with GTCN PAM
ucaguuaagguggggcaggg

SEQ ID NO: 12001 - RNA, 20 nt, Artificial Sequence
  targeting sequence with GTCN PAM
uugccuuaacugaugacauu

SEQ ID NO: 12002 - RNA, 20 nt, Artificial Sequence
  targeting sequence with GTCN PAM
ucaguuaaggcaaggaccag

SEQ ID NO: 12003 - RNA, 20 nt, Artificial Sequence
  targeting sequence with GTCN PAM
uuuuccugguucauccuggc

SEQ ID NO: 12004 - RNA, 20 nt, Artificial Sequence
  targeting sequence with GTCN PAM
caaggugcucaguggaggug

SEQ ID NO: 12005 - RNA, 20 nt, Artificial Sequence
  targeting sequence with GTCN PAM
aaggggguuuguucucuggc

SEQ ID NO: 12006 - RNA, 20 nt, Artificial Sequence
  targeting sequence with GTCN PAM
gcgaagggagauaaggguag

SEQ ID NO: 12007 - RNA, 20 nt, Artificial Sequence
  targeting sequence with GTCN PAM
aaaaagagagucagcgaagg

SEQ ID NO: 12008 - RNA, 20 nt, Artificial Sequence
  targeting sequence with GTCN PAM
cuucacacggaugcacaugu

SEQ ID NO: 12009 - RNA, 20 nt, Artificial Sequence
  targeting sequence with GTCN PAM
cccgauccgaguaacggcac

SEQ ID NO: 12010 - RNA, 20 nt, Artificial Sequence
  targeting sequence with GTCN PAM
uccugcucuuugcuccauga

SEQ ID NO: 12011 - RNA, 20 nt, Artificial Sequence
  targeting sequence with GTCN PAM
uagguggaucuuucucaugg

SEQ ID NO: 12012 - RNA, 20 nt, Artificial Sequence
  targeting sequence with GTCN PAM
ucagaccgaccagcccaaga

SEQ ID NO: 12013 - RNA, 20 nt, Artificial Sequence
  targeting sequence with GTCN PAM
gaggaccugaggucguaggu

SEQ ID NO: 12014 - RNA, 20 nt, Artificial Sequence
  targeting sequence with GTCN PAM
gucugaggaccugaggucgu

SEQ ID NO: 12015 - RNA, 20 nt, Artificial Sequence
  targeting sequence with GTCN PAM
gguaagcugccucuuuuuac

SEQ ID NO: 12016 - RNA, 20 nt, Artificial Sequence
  targeting sequence with GTCN PAM
cuaccaaaaaaugaaagaaa

SEQ ID NO: 12017 - RNA, 20 nt, Artificial Sequence
  targeting sequence with GTCN PAM
cuuuugucucuaccaaaaaa

SEQ ID NO: 12018 - RNA, 20 nt, Artificial Sequence
  targeting sequence with GTCN PAM
cggacugggaaggcagccuu

SEQ ID NO: 12019 - RNA, 20 nt, Artificial Sequence
  targeting sequence with GTCN PAM
gugaccggcaccgggguuuu

SEQ ID NO: 12020 - RNA, 20 nt, Artificial Sequence
  targeting sequence with GTCN PAM
gaccacgcagggacgccugc

SEQ ID NO: 12021 - RNA, 20 nt, Artificial Sequence
  targeting sequence with GTCN PAM
gacacccuugaaacgugagu

SEQ ID NO: 12022 - RNA, 20 nt, Artificial Sequence
  targeting sequence with GTCN PAM
cugcguggucugacacccuu

SEQ ID NO: 12023 - RNA, 20 nt, Artificial Sequence
  targeting sequence with GTCN PAM
uucacccuuagcggcaaguc

SEQ ID NO: 12024 - RNA, 20 nt, Artificial Sequence
  targeting sequence with GTCN PAM
cgcuuuccuagggggcaagg

SEQ ID NO: 12025 - RNA, 20 nt, Artificial Sequence
  targeting sequence with GTCN PAM
uugcccccuaggaaagcggg

SEQ ID NO: 12026 - RNA, 20 nt, Artificial Sequence
  targeting sequence with GTCN PAM
gggugcggaaauaagggauu

SEQ ID NO: 12027 - RNA, 20 nt, Artificial Sequence
  targeting sequence with GTCN PAM
caacccccucucugcuuuuc

SEQ ID NO: 12028 - RNA, 20 nt, Artificial Sequence
  targeting sequence with GTCN PAM
cuacgcucucuuuucucagg

SEQ ID NO: 12029 - RNA, 20 nt, Artificial Sequence
  targeting sequence with GTCN PAM
uuaagaacuuaaaaccucuu

SEQ ID NO: 12030 - RNA, 20 nt, Artificial Sequence
  targeting sequence with GTCN PAM
ggugugaguugaagagguuu

SEQ ID NO: 12031 - RNA, 20 nt, Artificial Sequence
  targeting sequence with GTCN PAM
aguuuguauuggggccaagu

SEQ ID NO: 12032 - RNA, 20 nt, Artificial Sequence
  targeting sequence with GTCN PAM
uguaggaugcagaaaucaaa

SEQ ID NO: 12033 - RNA, 20 nt, Artificial Sequence
  targeting sequence with GTCN PAM
aaaaaugggcaaauggucug

SEQ ID NO: 12034 - RNA, 20 nt, Artificial Sequence
  targeting sequence with GTCN PAM
gaggugccuuacguccaggc

SEQ ID NO: 12035 - RNA, 20 nt, Artificial Sequence
  targeting sequence with GTCN PAM
aggcauuuuucacacuucgu

SEQ ID NO: 12036 - RNA, 20 nt, Artificial Sequence
  targeting sequence with GTCN PAM
ccucagucccaaccccaagc

SEQ ID NO: 12037 - RNA, 20 nt, Artificial Sequence
  targeting sequence with GTCN PAM
caaccccaagcgucgcugag

SEQ ID NO: 12038 - RNA, 20 nt, Artificial Sequence
  targeting sequence with GTCN PAM
cugagucuuuccagucuucc

SEQ ID NO: 12039 - RNA, 20 nt, Artificial Sequence
  targeting sequence with GTCN PAM
uuccagucuuccuuuucuac

SEQ ID NO: 12040 - RNA, 20 nt, Artificial Sequence
  targeting sequence with GTCN PAM
uccuuuucuacagacccauc

SEQ ID NO: 12041 - RNA, 20 nt, Artificial Sequence
  targeting sequence with GTCN PAM
guagaaaaggaagacuggaa

SEQ ID NO: 12042 - RNA, 20 nt, Artificial Sequence
  targeting sequence with GTCN PAM
gaugggucuguagaaaagga

SEQ ID NO: 12043 - RNA, 20 nt, Artificial Sequence
  targeting sequence with GTCN PAM
caauucuuccucagccuccg

SEQ ID NO: 12044 - RNA, 20 nt, Artificial Sequence
  targeting sequence with GTCN PAM
cggaacgaaacugugagccg

SEQ ID NO: 12045 - RNA, 20 nt, Artificial Sequence
  targeting sequence with GTCN PAM
agguuaaugcuccuuuuucu

SEQ ID NO: 12046 - RNA, 20 nt, Artificial Sequence
  targeting sequence with GTCN PAM
ugaacugggcuggauuuuua

SEQ ID NO: 12047 - RNA, 20 nt, Artificial Sequence
  targeting sequence with GTCN PAM
caggguugcugccaaacgag

SEQ ID NO: 12048 - RNA, 20 nt, Artificial Sequence
  targeting sequence with GTCN PAM
agggcuguaaagugucucag

SEQ ID NO: 12049 - RNA, 20 nt, Artificial Sequence
  targeting sequence with GTCN PAM
aagggccgucuuauucucaa

SEQ ID NO: 12050 - RNA, 20 nt, Artificial Sequence
  targeting sequence with GTCN PAM
uauucucaauacucauuuua

SEQ ID NO: 12051 - RNA, 20 nt, Artificial Sequence
  targeting sequence with GTCN PAM
ggaguggauuggguaauaaa

SEQ ID NO: 12052 - RNA, 20 nt, Artificial Sequence
  targeting sequence with GTCN PAM
cacaguggaggcaaggaauu

SEQ ID NO: 12053 - RNA, 20 nt, Artificial Sequence
  targeting sequence with GTCN PAM
caucugugugggaccccacu

SEQ ID NO: 12054 - RNA, 20 nt, Artificial Sequence
  targeting sequence with GTCN PAM
cacacagaugggacgcggcu

SEQ ID NO: 12055 - RNA, 20 nt, Artificial Sequence
  targeting sequence with GTCN PAM
gauuuucaguggggucccac

SEQ ID NO: 12056 - RNA, 20 nt, Artificial Sequence
  targeting sequence with GTCN PAM
gagagccuugggccagaguu

SEQ ID NO: 12057 - RNA, 20 nt, Artificial Sequence
  targeting sequence with GTCN PAM
gucagagagccuugggccag

SEQ ID NO: 12058 - RNA, 20 nt, Artificial Sequence
  targeting sequence with GTCN PAM
ucagccgcuaagccgagaag

SEQ ID NO: 12059 - RNA, 20 nt, Artificial Sequence
  targeting sequence with GTCN PAM
gucuucagccgcuaagccga

SEQ ID NO: 12060 - RNA, 20 nt, Artificial Sequence
  targeting sequence with GTCN PAM
gggggcuuccgaggcgaucg

SEQ ID NO: 12061 - RNA, 20 nt, Artificial Sequence
  targeting sequence with GTCN PAM
gugauggucugggggcuucc

SEQ ID NO: 12062 - RNA, 20 nt, Artificial Sequence
  targeting sequence with GTCN PAM
ccuucuuaaucaauacggag

SEQ ID NO: 12063 - RNA, 20 nt, Artificial Sequence
  targeting sequence with GTCN PAM
auacccacaacaguuaugga

SEQ ID NO: 12064 - RNA, 20 nt, Artificial Sequence
  targeting sequence with GTCN PAM
aaguuggcaccagaguuggg

SEQ ID NO: 12065 - RNA, 20 nt, Artificial Sequence
  targeting sequence with GTCN PAM
cagccuaauaagggaacugg

SEQ ID NO: 12066 - RNA, 20 nt, Artificial Sequence
  targeting sequence with GTCN PAM
gggaagcagauaauuuaaag

SEQ ID NO: 12067 - RNA, 20 nt, Artificial Sequence
  targeting sequence with GTCN PAM
aggaauagucagggaagcag

SEQ ID NO: 12068 - RNA, 20 nt, Artificial Sequence
  targeting sequence with GTCN PAM
uccucuuguaccccccaccu

SEQ ID NO: 12069 - RNA, 20 nt, Artificial Sequence
  targeting sequence with GTCN PAM
uuaaucuuuuuaaagcgugc

SEQ ID NO: 12070 - RNA, 20 nt, Artificial Sequence
  targeting sequence with GTCN PAM
uaaaaccagacaagccuuac

SEQ ID NO: 12071 - RNA, 20 nt, Artificial Sequence
  targeting sequence with GTCN PAM
gguuuuaggacagguaaaau

SEQ ID NO: 12072 - RNA, 20 nt, Artificial Sequence
  targeting sequence with GTCN PAM
ucccagccucucuucacuuu

SEQ ID NO: 12073 - RNA, 20 nt, Artificial Sequence
  targeting sequence with GTCN PAM
aagugaaagugaagagaggc

SEQ ID NO: 12074 - RNA, 20 nt, Artificial Sequence
  targeting sequence with GTCN PAM
gucaaagugaaagugaagag

SEQ ID NO: 12075 - RNA, 20 nt, Artificial Sequence
  targeting sequence with GTCN PAM
gggucagucaaagugaaagu

SEQ ID NO: 12076 - RNA, 20 nt, Artificial Sequence
  targeting sequence with GTCN PAM
gugaagcuuugcagcaguac

SEQ ID NO: 12077 - RNA, 20 nt, Artificial Sequence
  targeting sequence with GTCN PAM
gacugaucucucaaacccca

SEQ ID NO: 12078 - RNA, 20 nt, Artificial Sequence
  targeting sequence with GTCN PAM
gacacgauuggcagggagag

SEQ ID NO: 12079 - RNA, 20 nt, Artificial Sequence
  targeting sequence with GTCN PAM
gaauucuuacacaagagcca

SEQ ID NO: 12080 - RNA, 20 nt, Artificial Sequence
  targeting sequence with GTCN PAM
uggcucuuguguaagaauuc

SEQ ID NO: 12081 - RNA, 20 nt, Artificial Sequence
  targeting sequence with GTCN PAM
aaacaacuugaccuuacugu

SEQ ID NO: 12082 - RNA, 20 nt, Artificial Sequence
  targeting sequence with GTCN PAM
aguuguuuggacagaaagcc

SEQ ID NO: 12083 - RNA, 20 nt, Artificial Sequence
  targeting sequence with GTCN PAM
gcgugcagcggcugccacug

SEQ ID NO: 12084 - RNA, 20 nt, Artificial Sequence
  targeting sequence with GTCN PAM
gguaugaggaagaaaauaga

SEQ ID NO: 12085 - RNA, 20 nt, Artificial Sequence
  targeting sequence with GTCN PAM
gggccaggaacaacgguaau

SEQ ID NO: 12086 - RNA, 20 nt, Artificial Sequence
  targeting sequence with GTCN PAM
ggugugguaucaggaauaau

SEQ ID NO: 12087 - RNA, 20 nt, Artificial Sequence
  targeting sequence with GTCN PAM
ugggggucaggugugguauc

SEQ ID NO: 12088 - RNA, 20 nt, Artificial Sequence
  targeting sequence with GTCN PAM
gguggaucagagagauacag

SEQ ID NO: 12089 - RNA, 20 nt, Artificial Sequence
  targeting sequence with GTCN PAM
gccuuugcugguguguggcg

SEQ ID NO: 12090 - RNA, 20 nt, Artificial Sequence
  targeting sequence with GTCN PAM
ugaauaaucccugaggagua

SEQ ID NO: 12091 - RNA, 20 nt, Artificial Sequence
  targeting sequence with GTCN PAM
uggguggggcaaauccucga

SEQ ID NO: 12092 - RNA, 20 nt, Artificial Sequence
  targeting sequence with GTCN PAM
gauaacuaaaauaccucuua

SEQ ID NO: 12093 - RNA, 20 nt, Artificial Sequence
  targeting sequence with GTCN PAM
ggagguauuuuaguuacugg

SEQ ID NO: 12094 - RNA, 20 nt, Artificial Sequence
  targeting sequence with GTCN PAM
gagaaggccaccgcagucau

SEQ ID NO: 12095 - RNA, 20 nt, Artificial Sequence
  targeting sequence with GTCN PAM
ucucuucccuucugucagac

SEQ ID NO: 12096 - RNA, 20 nt, Artificial Sequence
  targeting sequence with GTCN PAM
gacacaauuccucaguuuag

SEQ ID NO: 12097 - RNA, 20 nt, Artificial Sequence
  targeting sequence with GTCN PAM
gacagaagggaagagaugac

SEQ ID NO: 12098 - RNA, 20 nt, Artificial Sequence
  targeting sequence with GTCN PAM
gauaacagaugagccuuuau

SEQ ID NO: 12099 - RNA, 20 nt, Artificial Sequence
  targeting sequence with GTCN PAM
aaucagccaagcauuuuuuc

SEQ ID NO: 12100 - RNA, 20 nt, Artificial Sequence
  targeting sequence with GTCN PAM
uccgucuucaagaaaaguag

SEQ ID NO: 12101 - RNA, 20 nt, Artificial Sequence
  targeting sequence with GTCN PAM
ucaagaaaaguagaacagac

SEQ ID NO: 12102 - RNA, 20 nt, Artificial Sequence
  targeting sequence with GTCN PAM
guucuacuuuucuugaagac

SEQ ID NO: 12103 - RNA, 20 nt, Artificial Sequence
  targeting sequence with GTCN PAM
uuuaaaaacacaccucacca

SEQ ID NO: 12104 - RNA, 20 nt, Artificial Sequence
  targeting sequence with GTCN PAM
uuuuugguggcugagcuugg

SEQ ID NO: 12105 - RNA, 20 nt, Artificial Sequence
  targeting sequence with GTCN PAM
aguccuuuuugguggcugag

SEQ ID NO: 12106 - RNA, 20 nt, Artificial Sequence
  targeting sequence with GTCN PAM
ucggaaugcuacaagguaca

SEQ ID NO: 12107 - RNA, 20 nt, Artificial Sequence
  targeting sequence with GTCN PAM
auacaggagcuuaaaugggc

SEQ ID NO: 12108 - RNA, 20 nt, Artificial Sequence
  targeting sequence with GTCN PAM
cauuccagacaccagaccaa

SEQ ID NO: 12109 - RNA, 20 nt, Artificial Sequence
  targeting sequence with GTCN PAM
ggaaugagacuggggccuaa

SEQ ID NO: 12110 - RNA, 20 nt, Artificial Sequence
  targeting sequence with GTCN PAM
ggugucuggaaugagacugg

SEQ ID NO: 12111 - RNA, 20 nt, Artificial Sequence
  targeting sequence with GTCN PAM
aaguuggucuggugucugga

SEQ ID NO: 12112 - RNA, 20 nt, Artificial Sequence
  targeting sequence with GTCN PAM
ucccuacuaucuucugucua

SEQ ID NO: 12113 - RNA, 20 nt, Artificial Sequence
  targeting sequence with GTCN PAM
agucauacuccuauucaccg

SEQ ID NO: 12114 - RNA, 20 nt, Artificial Sequence
  targeting sequence with GTCN PAM
uacuccuauucaccguucuc

SEQ ID NO: 12115 - RNA, 20 nt, Artificial Sequence
  targeting sequence with GTCN PAM
ugccagcaaagauuauuuau

SEQ ID NO: 12116 - RNA, 20 nt, Artificial Sequence
  targeting sequence with GTCN PAM
uagguccucccaauucuuag

SEQ ID NO: 12117 - RNA, 20 nt, Artificial Sequence
  targeting sequence with GTCN PAM
ucccaauucuuaguccuuuu

SEQ ID NO: 12118 - RNA, 20 nt, Artificial Sequence
  targeting sequence with GTCN PAM
uuuuauaccuguuuuucucc

SEQ ID NO: 12119 - RNA, 20 nt, Artificial Sequence
  targeting sequence with GTCN PAM
uauagaaugauuggugaugg

SEQ ID NO: 12120 - RNA, 20 nt, Artificial Sequence
  targeting sequence with GTCN PAM
ggccucugagcccaagccac

SEQ ID NO: 12121 - RNA, 20 nt, Artificial Sequence
  targeting sequence with GTCN PAM
caggggaugcgauggcgugg

SEQ ID NO: 12122 - RNA, 20 nt, Artificial Sequence
  targeting sequence with GTCN PAM
ucaguuaagguggggcaggg

SEQ ID NO: 12123 - RNA, 20 nt, Artificial Sequence
  targeting sequence with GTCN PAM
uugccuuaacugaugacauu

SEQ ID NO: 12124 - RNA, 20 nt, Artificial Sequence
  targeting sequence with GTCN PAM
ucaguuaaggcaaggaccgg

SEQ ID NO: 12125 - RNA, 20 nt, Artificial Sequence
  targeting sequence with GTCN PAM
uuucccugguucauccuggc

SEQ ID NO: 12126 - RNA, 20 nt, Artificial Sequence
  targeting sequence with GTCN PAM
caaggugcucagugggggug

SEQ ID NO: 12127 - RNA, 20 nt, Artificial Sequence
  targeting sequence with GTCN PAM
caaggugcucagugggcagg

SEQ ID NO: 12128 - RNA, 20 nt, Artificial Sequence
  targeting sequence with GTCN PAM
aaggggguuuguuaucuggc

SEQ ID NO: 12129 - RNA, 20 nt, Artificial Sequence
  targeting sequence with GTCN PAM
gcgaagggagauaagggugg

SEQ ID NO: 12130 - RNA, 20 nt, Artificial Sequence
  targeting sequence with GTCN PAM
gaaaagagagucagcgaagg

SEQ ID NO: 12131 - RNA, 20 nt, Artificial Sequence
  targeting sequence with GTCN PAM
cuucacacggacgcgcauga

SEQ ID NO: 12132 - RNA, 20 nt, Artificial Sequence
  targeting sequence with GTCN PAM
gugugaagagaccaccaaac

SEQ ID NO: 12133 - RNA, 20 nt, Artificial Sequence
  targeting sequence with GTCN PAM
uagcacaguuacuuaaaaaa

SEQ ID NO: 12134 - RNA, 20 nt, Artificial Sequence
  targeting sequence with GTCN PAM
cuggccuucacauucacucc

SEQ ID NO: 12135 - RNA, 20 nt, Artificial Sequence
  targeting sequence with GTCN PAM
gugagugaguggggagugaa

SEQ ID NO: 12136 - RNA, 20 nt, Artificial Sequence
  targeting sequence with GTCN PAM
ugcaagcucuguucaugcua

SEQ ID NO: 12137 - RNA, 20 nt, Artificial Sequence
  targeting sequence with GTCN PAM
caaaaaaaaaaaaaaaaaaa

SEQ ID NO: 12138 - RNA, 20 nt, Artificial Sequence
  targeting sequence with GTCN PAM
cacucuguugcccagggugg

SEQ ID NO: 12139 - RNA, 20 nt, Artificial Sequence
  targeting sequence with GTCN PAM
cagcuacucgggaggcugag

SEQ ID NO: 12140 - RNA, 20 nt, Artificial Sequence
  targeting sequence with GTCN PAM
cgaucuccugaccucgugau

SEQ ID NO: 12141 - RNA, 20 nt, Artificial Sequence
  targeting sequence with GTCN PAM
ggagaucgagaccauccugg

SEQ ID NO: 12142 - RNA, 20 nt, Artificial Sequence
  targeting sequence with GTCN PAM
guagucuaggagcaauaggc

SEQ ID NO: 12143 - RNA, 20 nt, Artificial Sequence
  targeting sequence with GTCN PAM
aggagcaauaggcugucuau

SEQ ID NO: 12144 - RNA, 20 nt, Artificial Sequence
  targeting sequence with GTCN PAM
aucccauauagucucggugu

SEQ ID NO: 12145 - RNA, 20 nt, Artificial Sequence
  targeting sequence with GTCN PAM
cgguguguagugggcuaccc

SEQ ID NO: 12146 - RNA, 20 nt, Artificial Sequence
  targeting sequence with GTCN PAM
aacuauaugauauucgcacc

SEQ ID NO: 12147 - RNA, 20 nt, Artificial Sequence
  targeting sequence with GTCN PAM
uggugcgaauaucauauagu

SEQ ID NO: 12148 - RNA, 20 nt, Artificial Sequence
  targeting sequence with GTCN PAM
cuggcaauuuugucauggug

SEQ ID NO: 12149 - RNA, 20 nt, Artificial Sequence
  targeting sequence with GTCN PAM
ugcauccauaugucccuggc

SEQ ID NO: 12150 - RNA, 20 nt, Artificial Sequence
  targeting sequence with GTCN PAM
ucagauuacaccggaagacu

SEQ ID NO: 12151 - RNA, 20 nt, Artificial Sequence
  targeting sequence with GTCN PAM
uccgguguaaucugaugaca

SEQ ID NO: 12152 - RNA, 20 nt, Artificial Sequence
  targeting sequence with GTCN PAM
guugcacgcucuggcaccuc

SEQ ID NO: 12153 - RNA, 20 nt, Artificial Sequence
  targeting sequence with GTCN PAM
uuccaccuccagagaccuug

SEQ ID NO: 12154 - RNA, 20 nt, Artificial Sequence
  targeting sequence with GTCN PAM
cuggagguggaaggacugag

SEQ ID NO: 12155 - RNA, 20 nt, Artificial Sequence
  targeting sequence with GTCN PAM
cuacgauaacaagcuccucc

SEQ ID NO: 12156 - RNA, 20 nt, Artificial Sequence
  targeting sequence with GTCN PAM
gaaagggcguguuuggaaug

SEQ ID NO: 12157 - RNA, 20 nt, Artificial Sequence
  targeting sequence with GTCN PAM
augaaaauauuggaguuggg

SEQ ID NO: 12158 - RNA, 20 nt, Artificial Sequence
  targeting sequence with GTCN PAM
gccucucacucaccuccuug

SEQ ID NO: 12159 - RNA, 20 nt, Artificial Sequence
  targeting sequence with GTCN PAM
gggcugggaggaggggagau

SEQ ID NO: 12160 - RNA, 20 nt, Artificial Sequence
  targeting sequence with GTCN PAM
agucugccauccacccuccc

SEQ ID NO: 12161 - RNA, 20 nt, Artificial Sequence
  targeting sequence with GTCN PAM
gccauccacccuccccacau

SEQ ID NO: 12162 - RNA, 20 nt, Artificial Sequence
  targeting sequence with GTCN PAM
cacucacaaaccacucggcu

SEQ ID NO: 12163 - RNA, 20 nt, Artificial Sequence
  targeting sequence with GTCN PAM
uaaaaacccacuccguuucc

SEQ ID NO: 12164 - RNA, 20 nt, Artificial Sequence
  targeting sequence with GTCN PAM
auuucucugccugacuuauu

SEQ ID NO: 12165 - RNA, 20 nt, Artificial Sequence
  targeting sequence with GTCN PAM
ggcagagaaauggacuugga

SEQ ID NO: 12166 - RNA, 20 nt, Artificial Sequence
  targeting sequence with GTCN PAM
gugaaauggcaauaguuaca

SEQ ID NO: 12167 - RNA, 20 nt, Artificial Sequence
  targeting sequence with GTCN PAM
aucucuucgucugugaaaug

SEQ ID NO: 12168 - RNA, 20 nt, Artificial Sequence
  targeting sequence with GTCN PAM
cuuccugugugucuaucucu

SEQ ID NO: 12169 - RNA, 20 nt, Artificial Sequence
  targeting sequence with GTCN PAM
cgcagucucuuccugugugu

SEQ ID NO: 12170 - RNA, 20 nt, Artificial Sequence
  targeting sequence with GTCN PAM
uggagcccaggccuguggcc

SEQ ID NO: 12171 - RNA, 20 nt, Artificial Sequence
  targeting sequence with GTCN PAM
gggggcagggcagcacugca

SEQ ID NO: 12172 - RNA, 20 nt, Artificial Sequence
  targeting sequence with GTCN PAM
uugucugggggcagggcagc

SEQ ID NO: 12173 - RNA, 20 nt, Artificial Sequence
  targeting sequence with GTCN PAM
auuuucucauuggaauagga

SEQ ID NO: 12174 - RNA, 20 nt, Artificial Sequence
  targeting sequence with GTCN PAM
agaggauagagccuuccacc

SEQ ID NO: 12175 - RNA, 20 nt, Artificial Sequence
  targeting sequence with GTCN PAM
caacuguaacacuuccauca

SEQ ID NO: 12176 - RNA, 20 nt, Artificial Sequence
  targeting sequence with GTCN PAM
gugguggccgucuuuggcuc

SEQ ID NO: 12177 - RNA, 20 nt, Artificial Sequence
  targeting sequence with GTCN PAM
uuggcuccucuuccugcauu

SEQ ID NO: 12178 - RNA, 20 nt, Artificial Sequence
  targeting sequence with GTCN PAM
cuacacaggccuuccuggug

SEQ ID NO: 12179 - RNA, 20 nt, Artificial Sequence
  targeting sequence with GTCN PAM
gguguucugauuuagccaug

SEQ ID NO: 12180 - RNA, 20 nt, Artificial Sequence
  targeting sequence with GTCN PAM
gaugcugggguccgguguuc

SEQ ID NO: 12181 - RNA, 20 nt, Artificial Sequence
  targeting sequence with GTCN PAM
cgugggccucauuugaccca

SEQ ID NO: 12182 - RNA, 20 nt, Artificial Sequence
  targeting sequence with GTCN PAM
aaugaggcccacgggacaag

SEQ ID NO: 12183 - RNA, 20 nt, Artificial Sequence
  targeting sequence with GTCN PAM
cuuccuccuccuggacaugc

SEQ ID NO: 12184 - RNA, 20 nt, Artificial Sequence
  targeting sequence with GTCN PAM
aggaggaggaagugaccaac

SEQ ID NO: 12185 - RNA, 20 nt, Artificial Sequence
  targeting sequence with GTCN PAM
ccugucauugaauuacguug

SEQ ID NO: 12186 - RNA, 20 nt, Artificial Sequence
  targeting sequence with GTCN PAM
uugaauuacguugauauguu

SEQ ID NO: 12187 - RNA, 20 nt, Artificial Sequence
  targeting sequence with GTCN PAM
acauaucaacguaauucaau

SEQ ID NO: 12188 - RNA, 20 nt, Artificial Sequence
  targeting sequence with GTCN PAM
cauggaacuuaggggagaug

SEQ ID NO: 12189 - RNA, 20 nt, Artificial Sequence
  targeting sequence with GTCN PAM
cuuaaggagcagcuggggag

SEQ ID NO: 12190 - RNA, 20 nt, Artificial Sequence
  targeting sequence with GTCN PAM
ccucucacaucucaucugug

SEQ ID NO: 12191 - RNA, 20 nt, Artificial Sequence
  targeting sequence with GTCN PAM
acagaugagaugugagaggu

SEQ ID NO: 12192 - RNA, 20 nt, Artificial Sequence
  targeting sequence with GTCN PAM
cacugcugccucugaucuaa

SEQ ID NO: 12193 - RNA, 20 nt, Artificial Sequence
  targeting sequence with GTCN PAM
cccaccugcucucucugcuu

SEQ ID NO: 12194 - RNA, 20 nt, Artificial Sequence
  targeting sequence with GTCN PAM
ccgacaucuauuuuccaaau

SEQ ID NO: 12195 - RNA, 20 nt, Artificial Sequence
  targeting sequence with GTCN PAM
gugaccaggguaaaagcaga

SEQ ID NO: 12196 - RNA, 20 nt, Artificial Sequence
  targeting sequence with GTCN PAM
cucugauaugguuucgcugu

SEQ ID NO: 12197 - RNA, 20 nt, Artificial Sequence
  targeting sequence with GTCN PAM
ccauucaaaucucagcuuga

SEQ ID NO: 12198 - RNA, 20 nt, Artificial Sequence
  targeting sequence with GTCN PAM
cucccacaacacgugggaau

SEQ ID NO: 12199 - RNA, 20 nt, Artificial Sequence
  targeting sequence with GTCN PAM
uucccaugcuauucucaugg

SEQ ID NO: 12200 - RNA, 20 nt, Artificial Sequence
  targeting sequence with GTCN PAM
caggagaucugauggguuua

SEQ ID NO: 12201 - RNA, 20 nt, Artificial Sequence
  targeting sequence with GTCN PAM
ugauucugagaccuccgcag

SEQ ID NO: 12202 - RNA, 20 nt, Artificial Sequence
  targeting sequence with GTCN PAM
cagaaucaugacgggaaacg

SEQ ID NO: 12203 - RNA, 20 nt, Artificial Sequence
  targeting sequence with GTCN PAM
aauuaaaccuauuuuucuuc

SEQ ID NO: 12204 - RNA, 20 nt, Artificial Sequence
  targeting sequence with GTCN PAM
cagguaugucuuuaucagca

SEQ ID NO: 12205 - RNA, 20 nt, Artificial Sequence
  targeting sequence with GTCN PAM
uuaucagcagcauaaaaaug

SEQ ID NO: 12206 - RNA, 20 nt, Artificial Sequence
  targeting sequence with GTCN PAM
auuuuuaugcugcugauaaa

SEQ ID NO: 12207 - RNA, 20 nt, Artificial Sequence
  targeting sequence with GTCN PAM
uuuccacauuuucagguauc

SEQ ID NO: 12208 - RNA, 20 nt, Artificial Sequence
  targeting sequence with GTCN PAM
ucuucugagcccuccaaacu

SEQ ID NO: 12209 - RNA, 20 nt, Artificial Sequence
  targeting sequence with GTCN PAM
cuaggaaguuccaaacuuuc

SEQ ID NO: 12210 - RNA, 20 nt, Artificial Sequence
  targeting sequence with GTCN PAM
aagccauugaacaagucucu

SEQ ID NO: 12211 - RNA, 20 nt, Artificial Sequence
  targeting sequence with GTCN PAM
cagagggggcagaugaggaa

SEQ ID NO: 12212 - RNA, 20 nt, Artificial Sequence
  targeting sequence with GTCN PAM
ccuuugcuccaguucccaac

SEQ ID NO: 12213 - RNA, 20 nt, Artificial Sequence
  targeting sequence with GTCN PAM
cuuugcuaaaacauaacagg

SEQ ID NO: 12214 - RNA, 20 nt, Artificial Sequence
  targeting sequence with GTCN PAM
aacuugagagagacgauuua

SEQ ID NO: 12215 - RNA, 20 nt, Artificial Sequence
  targeting sequence with GTCN PAM
cucucaaguucgacguuccg

SEQ ID NO: 12216 - RNA, 20 nt, Artificial Sequence
  targeting sequence with GTCN PAM
ccucuugaaugcuuugcugc

SEQ ID NO: 12217 - RNA, 20 nt, Artificial Sequence
  targeting sequence with GTCN PAM
ccaggccaugucagggaccu

SEQ ID NO: 12218 - RNA, 20 nt, Artificial Sequence
  targeting sequence with GTCN PAM
gggaccuucacaacagcucc

SEQ ID NO: 12219 - RNA, 20 nt, Artificial Sequence
  targeting sequence with GTCN PAM
cugacauggccuggagacau

SEQ ID NO: 12220 - RNA, 20 nt, Artificial Sequence
  targeting sequence with GTCN PAM
cugggcugcacacagcacag

SEQ ID NO: 12221 - RNA, 20 nt, Artificial Sequence
  targeting sequence with GTCN PAM
cagcugcuccaggcauggcu

SEQ ID NO: 12222 - RNA, 20 nt, Artificial Sequence
  targeting sequence with GTCN PAM
acauacagcuugggcugugg

SEQ ID NO: 12223 - RNA, 20 nt, Artificial Sequence
  targeting sequence with GTCN PAM
uggggcuuccaccucugaag

SEQ ID NO: 12224 - RNA, 20 nt, Artificial Sequence
  targeting sequence with GTCN PAM
agaauugagguuugggaacc

SEQ ID NO: 12225 - RNA, 20 nt, Artificial Sequence
  targeting sequence with GTCN PAM
ucugaaaucuagguggaggu

SEQ ID NO: 12226 - RNA, 20 nt, Artificial Sequence
  targeting sequence with GTCN PAM
aggcagaaauuugcuucagg

SEQ ID NO: 12227 - RNA, 20 nt, Artificial Sequence
  targeting sequence with GTCN PAM
uaccagagguucuccaugag

SEQ ID NO: 12228 - RNA, 20 nt, Artificial Sequence
  targeting sequence with GTCN PAM
cagcccccagacagaauccc

SEQ ID NO: 12229 - RNA, 20 nt, Artificial Sequence
  targeting sequence with GTCN PAM
gggggcugugaccccacauu

SEQ ID NO: 12230 - RNA, 20 nt, Artificial Sequence
  targeting sequence with GTCN PAM
uccagaccccagaaugguag

SEQ ID NO: 12231 - RNA, 20 nt, Artificial Sequence
  targeting sequence with GTCN PAM
ggaggacaguggcccucuac

SEQ ID NO: 12232 - RNA, 20 nt, Artificial Sequence
  targeting sequence with GTCN PAM
guggaucuaccauucugggg

SEQ ID NO: 12233 - RNA, 20 nt, Artificial Sequence
  targeting sequence with GTCN PAM
gcagauuuuccaggagaaca

SEQ ID NO: 12234 - RNA, 20 nt, Artificial Sequence
  targeting sequence with GTCN PAM
caggggcagagcugcccaag

SEQ ID NO: 12235 - RNA, 20 nt, Artificial Sequence
  targeting sequence with GTCN PAM
ugggcagcucugccccugug

SEQ ID NO: 12236 - RNA, 20 nt, Artificial Sequence
  targeting sequence with GTCN PAM
cgcugaugcaagagguaggu

SEQ ID NO: 12237 - RNA, 20 nt, Artificial Sequence
  targeting sequence with GTCN PAM
aaggagaucauuuuggagcu

SEQ ID NO: 12238 - RNA, 20 nt, Artificial Sequence
  targeting sequence with GTCN PAM
aauuuuaaagcuccaaaaug

SEQ ID NO: 12239 - RNA, 20 nt, Artificial Sequence
  targeting sequence with GTCN PAM
aaaauccaguggugcaguca

SEQ ID NO: 12240 - RNA, 20 nt, Artificial Sequence
  targeting sequence with GTCN PAM
cuuccaccuaugagccugua

SEQ ID NO: 12241 - RNA, 20 nt, Artificial Sequence
  targeting sequence with GTCN PAM
cagaugagacuuuggacugu

SEQ ID NO: 12242 - RNA, 20 nt, Artificial Sequence
  targeting sequence with GTCN PAM
caucugagacaaggcaaguc

SEQ ID NO: 12243 - RNA, 20 nt, Artificial Sequence
  targeting sequence with GTCN PAM
aaagucucaucugagacaag

SEQ ID NO: 12244 - RNA, 20 nt, Artificial Sequence
  targeting sequence with GTCN PAM
acaguccaaagucucaucug

SEQ ID NO: 12245 - RNA, 20 nt, Artificial Sequence
  targeting sequence with GTCN PAM
augcugaaaugaguuaaaac

SEQ ID NO: 12246 - RNA, 20 nt, Artificial Sequence
  targeting sequence with GTCN PAM
cucaaaguuuuaacucauuu

SEQ ID NO: 12247 - RNA, 20 nt, Artificial Sequence
  targeting sequence with GTCN PAM
ucacauuucaaaaccaauca

SEQ ID NO: 12248 - RNA, 20 nt, Artificial Sequence
  targeting sequence with GTCN PAM
ggggcagaaugaugugguuu

SEQ ID NO: 12249 - RNA, 20 nt, Artificial Sequence
  targeting sequence with GTCN PAM
cccagaauucccacauguug

SEQ ID NO: 12250 - RNA, 20 nt, Artificial Sequence
  targeting sequence with GTCN PAM
uucccaugcuauucucguga

SEQ ID NO: 12251 - RNA, 20 nt, Artificial Sequence
  targeting sequence with GTCN PAM
cauaggaucugaugggauua

SEQ ID NO: 12252 - RNA, 20 nt, Artificial Sequence
  targeting sequence with GTCN PAM
aauuaaaccucuuuuucuuc

SEQ ID NO: 12253 - RNA, 20 nt, Artificial Sequence
  targeting sequence with GTCN PAM
uggguaugucuuuaucagca

SEQ ID NO: 12254 - RNA, 20 nt, Artificial Sequence
  targeting sequence with GTCN PAM
uuaucagcagcaugaaaacg

SEQ ID NO: 12255 - RNA, 20 nt, Artificial Sequence
  targeting sequence with GTCN PAM
ccagaaugguuggcgagcuc

SEQ ID NO: 12256 - RNA, 20 nt, Artificial Sequence
  targeting sequence with GTCN PAM
gcccccacaccagccuccag

SEQ ID NO: 12257 - RNA, 20 nt, Artificial Sequence
  targeting sequence with GTCN PAM
ggggcagcacuucuccacug

SEQ ID NO: 12258 - RNA, 20 nt, Artificial Sequence
  targeting sequence with GTCN PAM
acggcccguccucucagcuc

SEQ ID NO: 12259 - RNA, 20 nt, Artificial Sequence
  targeting sequence with GTCN PAM
ucucagcuccuuuccuccag

SEQ ID NO: 12260 - RNA, 20 nt, Artificial Sequence
  targeting sequence with GTCN PAM
cccacccucuucucuuuucc

SEQ ID NO: 12261 - RNA, 20 nt, Artificial Sequence
  targeting sequence with GTCN PAM
ucuguuccgcccuacuagag

SEQ ID NO: 12262 - RNA, 20 nt, Artificial Sequence
  targeting sequence with GTCN PAM
guuccgcccuacuagaggga

SEQ ID NO: 12263 - RNA, 20 nt, Artificial Sequence
  targeting sequence with GTCN PAM
cugguacauaauagguguuc

SEQ ID NO: 12264 - RNA, 20 nt, Artificial Sequence
  targeting sequence with GTCN PAM
uuaaacauacaugucaggcu

SEQ ID NO: 12265 - RNA, 20 nt, Artificial Sequence
  targeting sequence with GTCN PAM
ggcucuagcuuggugcuagg

SEQ ID NO: 12266 - RNA, 20 nt, Artificial Sequence
  targeting sequence with GTCN PAM
uccuuggcaucccuagcacc

SEQ ID NO: 12267 - RNA, 20 nt, Artificial Sequence
  targeting sequence with GTCN PAM
ggucauccuuggcaucccua

SEQ ID NO: 12268 - RNA, 20 nt, Artificial Sequence
  targeting sequence with GTCN PAM
ugaacucaguauaagcaggg

SEQ ID NO: 12269 - RNA, 20 nt, Artificial Sequence
  targeting sequence with GTCN PAM
uccccacgggucgugaacuc

SEQ ID NO: 12270 - RNA, 20 nt, Artificial Sequence
  targeting sequence with GTCN PAM
gagagugcaucugucuuccc

SEQ ID NO: 12271 - RNA, 20 nt, Artificial Sequence
  targeting sequence with GTCN PAM
ccuuccauguagccccuacu

SEQ ID NO: 12272 - RNA, 20 nt, Artificial Sequence
  targeting sequence with GTCN PAM
ccccgaccucaggagggaga

SEQ ID NO: 12273 - RNA, 20 nt, Artificial Sequence
  targeting sequence with GTCN PAM
gggagacagggcugcaacuc

SEQ ID NO: 12274 - RNA, 20 nt, Artificial Sequence
  targeting sequence with GTCN PAM
acucugacccauagcugugu

SEQ ID NO: 12275 - RNA, 20 nt, Artificial Sequence
  targeting sequence with GTCN PAM
gaguggacuuaaacucccuu

SEQ ID NO: 12276 - RNA, 20 nt, Artificial Sequence
  targeting sequence with GTCN PAM
auuaaacagagaugauaguc

SEQ ID NO: 12277 - RNA, 20 nt, Artificial Sequence
  targeting sequence with GTCN PAM
cagcacagcaugucccacag

SEQ ID NO: 12278 - RNA, 20 nt, Artificial Sequence
  targeting sequence with GTCN PAM
cacagggcuggggcgaauga

SEQ ID NO: 12279 - RNA, 20 nt, Artificial Sequence
  targeting sequence with GTCN PAM
cauucgccccagcccugugg

SEQ ID NO: 12280 - RNA, 20 nt, Artificial Sequence
  targeting sequence with GTCN PAM
acaaagcauuuucauccuuc

SEQ ID NO: 12281 - RNA, 20 nt, Artificial Sequence
  targeting sequence with GTCN PAM
uuugggguuuuucugaggug

SEQ ID NO: 12282 - RNA, 20 nt, Artificial Sequence
  targeting sequence with GTCN PAM
cacucuguugcccagcugaa

SEQ ID NO: 12283 - RNA, 20 nt, Artificial Sequence
  targeting sequence with GTCN PAM
cgaacuccugaccucaauug

SEQ ID NO: 12284 - RNA, 20 nt, Artificial Sequence
  targeting sequence with GTCN PAM
ggaguucgagaccagccugg

SEQ ID NO: 12285 - RNA, 20 nt, Artificial Sequence
  targeting sequence with GTCN PAM
gccucggacucccaaaaugc

SEQ ID NO: 12286 - RNA, 20 nt, Artificial Sequence
  targeting sequence with GTCN PAM
gaggcagacggaucaauuga

SEQ ID NO: 12287 - RNA, 20 nt, Artificial Sequence
  targeting sequence with GTCN PAM
gcauucuacaguuauaucau

SEQ ID NO: 12288 - RNA, 20 nt, Artificial Sequence
  targeting sequence with GTCN PAM
ugaugucugcauucuacagu

SEQ ID NO: 12289 - RNA, 20 nt, Artificial Sequence
  targeting sequence with GTCN PAM
guaccuuaaaucuuauguug

SEQ ID NO: 12290 - RNA, 20 nt, Artificial Sequence
  targeting sequence with GTCN PAM
cugcauaaacaacauaagau

SEQ ID NO: 12291 - RNA, 20 nt, Artificial Sequence
  targeting sequence with GTCN PAM
aacaucaauaacuuuuaaac

SEQ ID NO: 12292 - RNA, 20 nt, Artificial Sequence
  targeting sequence with GTCN PAM
auauauaaaccuccauuuau

SEQ ID NO: 12293 - RNA, 20 nt, Artificial Sequence
  targeting sequence with GTCN PAM
guucauauggugggauauuu

SEQ ID NO: 12294 - RNA, 20 nt, Artificial Sequence
  targeting sequence with GTCN PAM
cuccauugaugaauguuugg

SEQ ID NO: 12295 - RNA, 20 nt, Artificial Sequence
  targeting sequence with GTCN PAM
uauauuacacuucuguuugc

SEQ ID NO: 12296 - RNA, 20 nt, Artificial Sequence
  targeting sequence with GTCN PAM
ccucuaauaaaacucucacu

SEQ ID NO: 12297 - RNA, 20 nt, Artificial Sequence
  targeting sequence with GTCN PAM
gagccaggacucauaccacc

SEQ ID NO: 12298 - RNA, 20 nt, Artificial Sequence
  targeting sequence with GTCN PAM
uggcuccgacugcaacaugu

SEQ ID NO: 12299 - RNA, 20 nt, Artificial Sequence
  targeting sequence with GTCN PAM
cgcugcugggagccacaggg

SEQ ID NO: 12300 - RNA, 20 nt, Artificial Sequence
  targeting sequence with GTCN PAM
gggcuuccuauacccuguuc

SEQ ID NO: 12301 - RNA, 20 nt, Artificial Sequence
  targeting sequence with GTCN PAM
uuacugagucagaagcuguu

SEQ ID NO: 12302 - RNA, 20 nt, Artificial Sequence
  targeting sequence with GTCN PAM
gaagcuguuuuaagagcuga

SEQ ID NO: 12303 - RNA, 20 nt, Artificial Sequence
  targeting sequence with GTCN PAM
uggacccuuuguccauccug

SEQ ID NO: 12304 - RNA, 20 nt, Artificial Sequence
  targeting sequence with GTCN PAM
aggacagcagcacgcuuuuc

SEQ ID NO: 12305 - RNA, 20 nt, Artificial Sequence
  targeting sequence with GTCN PAM
auccugggccauugggccag

SEQ ID NO: 12306 - RNA, 20 nt, Artificial Sequence
  targeting sequence with GTCN PAM
uugcuagauuauauuagggc

SEQ ID NO: 12307 - RNA, 20 nt, Artificial Sequence
  targeting sequence with GTCN PAM
acuugccuaauuauuuccuu

SEQ ID NO: 12308 - RNA, 20 nt, Artificial Sequence
  targeting sequence with GTCN PAM
guauauagcacauuuucaca

SEQ ID NO: 12309 - RNA, 20 nt, Artificial Sequence
  targeting sequence with GTCN PAM
guagcaaacugugaaaaugu

SEQ ID NO: 12310 - RNA, 20 nt, Artificial Sequence
  targeting sequence with GTCN PAM
caagggaguuuuguuacuaa

SEQ ID NO: 12311 - RNA, 20 nt, Artificial Sequence
  targeting sequence with GTCN PAM
uaguaacaaaacucccuugc

SEQ ID NO: 12312 - RNA, 20 nt, Artificial Sequence
  targeting sequence with GTCN PAM
uuucuaaucagggagaaaaa

SEQ ID NO: 12313 - RNA, 20 nt, Artificial Sequence
  targeting sequence with GTCN PAM
uccuuuuuuaaaucuuuuuu

SEQ ID NO: 12314 - RNA, 20 nt, Artificial Sequence
  targeting sequence with GTCN PAM
ugaaauaaaaggcugauaag

SEQ ID NO: 12315 - RNA, 20 nt, Artificial Sequence
  targeting sequence with GTCN PAM
aacuuaucagccuuuuauuu

SEQ ID NO: 12316 - RNA, 20 nt, Artificial Sequence
  targeting sequence with GTCN PAM
aaaaucaaucaacaaacugg

SEQ ID NO: 12317 - RNA, 20 nt, Artificial Sequence
  targeting sequence with GTCN PAM
cuuauguauguugcaaaucu

SEQ ID NO: 12318 - RNA, 20 nt, Artificial Sequence
  targeting sequence with GTCN PAM
cuucauuuuuucauuuuggc

SEQ ID NO: 12319 - RNA, 20 nt, Artificial Sequence
  targeting sequence with GTCN PAM
uugaacugucucuucauuuu

SEQ ID NO: 12320 - RNA, 20 nt, Artificial Sequence
  targeting sequence with GTCN PAM
aaauauuuggcaacucugug

SEQ ID NO: 12321 - RNA, 20 nt, Artificial Sequence
  targeting sequence with GTCN PAM
cacccaggccaacacagagu

SEQ ID NO: 12322 - RNA, 20 nt, Artificial Sequence
  targeting sequence with GTCN PAM
aauguaggaaacugcaauca

SEQ ID NO: 12323 - RNA, 20 nt, Artificial Sequence
  targeting sequence with GTCN PAM
ugugucucgcuuaggagaag

SEQ ID NO: 12324 - RNA, 20 nt, Artificial Sequence
  targeting sequence with GTCN PAM
cgcuuaggagaaggaaaugu

SEQ ID NO: 12325 - RNA, 20 nt, Artificial Sequence
  targeting sequence with GTCN PAM
cuuuuguguggaagcugcau

SEQ ID NO: 12326 - RNA, 20 nt, Artificial Sequence
  targeting sequence with GTCN PAM
ccucuuugcuuuccgucagc

SEQ ID NO: 12327 - RNA, 20 nt, Artificial Sequence
  targeting sequence with GTCN PAM
gccucaguguucagcaaugu

SEQ ID NO: 12328 - RNA, 20 nt, Artificial Sequence
  targeting sequence with GTCN PAM
gguucuggggugaggguaau

SEQ ID NO: 12329 - RNA, 20 nt, Artificial Sequence
  targeting sequence with GTCN PAM
uugauggacaugugagguga

SEQ ID NO: 12330 - RNA, 20 nt, Artificial Sequence
  targeting sequence with GTCN PAM
aucaaggacuuugcuucacu

SEQ ID NO: 12331 - RNA, 20 nt, Artificial Sequence
  targeting sequence with GTCN PAM
caccucacauguccaucaag

SEQ ID NO: 12332 - RNA, 20 nt, Artificial Sequence
  targeting sequence with GTCN PAM
aagguuuauuucugucucac

SEQ ID NO: 12333 - RNA, 20 nt, Artificial Sequence
  targeting sequence with GTCN PAM
ucccacgagcagugcuggag

SEQ ID NO: 12334 - RNA, 20 nt, Artificial Sequence
  targeting sequence with GTCN PAM
uuauccauagcuguuugcac

SEQ ID NO: 12335 - RNA, 20 nt, Artificial Sequence
  targeting sequence with GTCN PAM
guccuuauccauagcuguuu

SEQ ID NO: 12336 - RNA, 20 nt, Artificial Sequence
  targeting sequence with GTCN PAM
uuugcuauugcaauccaagu

SEQ ID NO: 12337 - RNA, 20 nt, Artificial Sequence
  targeting sequence with GTCN PAM
uuagccaauuuccuauuggu

SEQ ID NO: 12338 - RNA, 20 nt, Artificial Sequence
  targeting sequence with GTCN PAM
uaaccuagcccuaaucucgg

SEQ ID NO: 12339 - RNA, 20 nt, Artificial Sequence
  targeting sequence with GTCN PAM
gauuaaguugucccucucca

SEQ ID NO: 12340 - RNA, 20 nt, Artificial Sequence
  targeting sequence with GTCN PAM
cucuccaccccaccaauaua

SEQ ID NO: 12341 - RNA, 20 nt, Artificial Sequence
  targeting sequence with GTCN PAM
acuuuuauaaaacuacuugg

SEQ ID NO: 12342 - RNA, 20 nt, Artificial Sequence
  targeting sequence with GTCN PAM
gcacagcucuaaucggcgcc

SEQ ID NO: 12343 - RNA, 20 nt, Artificial Sequence
  targeting sequence with GTCN PAM
caaguaucucuccccuuucu

SEQ ID NO: 12344 - RNA, 20 nt, Artificial Sequence
  targeting sequence with GTCN PAM
uuggauuuagggaccauccu

SEQ ID NO: 12345 - RNA, 20 nt, Artificial Sequence
  targeting sequence with GTCN PAM
cuaaauccaaugacugauau

SEQ ID NO: 12346 - RNA, 20 nt, Artificial Sequence
  targeting sequence with GTCN PAM
auuacaucugcaaagaucuc

SEQ ID NO: 12347 - RNA, 20 nt, Artificial Sequence
  targeting sequence with GTCN PAM
cauucaaaaguaccaggggu

SEQ ID NO: 12348 - RNA, 20 nt, Artificial Sequence
  targeting sequence with GTCN PAM
uagacuuaucuuuuuggggg

SEQ ID NO: 12349 - RNA, 20 nt, Artificial Sequence
  targeting sequence with GTCN PAM
aagacuaaccccugguacuu

SEQ ID NO: 12350 - RNA, 20 nt, Artificial Sequence
  targeting sequence with GTCN PAM
cccaaaaagauaagucuaag

SEQ ID NO: 12351 - RNA, 20 nt, Artificial Sequence
  targeting sequence with GTCN PAM
gcagccaccauugcugugag

SEQ ID NO: 12352 - RNA, 20 nt, Artificial Sequence
  targeting sequence with GTCN PAM
augaggggaaggcaauggcu

SEQ ID NO: 12353 - RNA, 20 nt, Artificial Sequence
  targeting sequence with GTCN PAM
cucaaaaugcuuuucuagcc

SEQ ID NO: 12354 - RNA, 20 nt, Artificial Sequence
  targeting sequence with GTCN PAM
gcugaguauaagaggauggu

SEQ ID NO: 12355 - RNA, 20 nt, Artificial Sequence
  targeting sequence with GTCN PAM
ccucugcccugaaggaggaa

SEQ ID NO: 12356 - RNA, 20 nt, Artificial Sequence
  targeting sequence with GTCN PAM
acacccauccuuuuccccuc

SEQ ID NO: 12357 - RNA, 20 nt, Artificial Sequence
  targeting sequence with GTCN PAM
gaagccucuucuggggccuc

SEQ ID NO: 12358 - RNA, 20 nt, Artificial Sequence
  targeting sequence with GTCN PAM
ccuucucccucuucucaaau

SEQ ID NO: 12359 - RNA, 20 nt, Artificial Sequence
  targeting sequence with GTCN PAM
cuucucaucccauauccucc

SEQ ID NO: 12360 - RNA, 20 nt, Artificial Sequence
  targeting sequence with GTCN PAM
cagagcccagggugcuuccu

SEQ ID NO: 12361 - RNA, 20 nt, Artificial Sequence
  targeting sequence with GTCN PAM
agcaugcaguggguguguuc

SEQ ID NO: 12362 - RNA, 20 nt, Artificial Sequence
  targeting sequence with GTCN PAM
ccaggcccaggaagggggcu

SEQ ID NO: 12363 - RNA, 20 nt, Artificial Sequence
  targeting sequence with GTCN PAM
cucugugcacaggcuucauc

SEQ ID NO: 12364 - RNA, 20 nt, Artificial Sequence
  targeting sequence with GTCN PAM
uuaccgugcacccagagaau

SEQ ID NO: 12365 - RNA, 20 nt, Artificial Sequence
  targeting sequence with GTCN PAM
caaaggggagcagcagggaa

SEQ ID NO: 12366 - RNA, 20 nt, Artificial Sequence
  targeting sequence with GTCN PAM
gcaaaccaugagcuccuacu

SEQ ID NO: 12367 - RNA, 20 nt, Artificial Sequence
  targeting sequence with GTCN PAM
gaguuauccccaucgagccc

SEQ ID NO: 12368 - RNA, 20 nt, Artificial Sequence
  targeting sequence with GTCN PAM
cugucaacccacugguugca

SEQ ID NO: 12369 - RNA, 20 nt, Artificial Sequence
  targeting sequence with GTCN PAM
acccacugguugcacugucu

SEQ ID NO: 12370 - RNA, 20 nt, Artificial Sequence
  targeting sequence with GTCN PAM
uugugcacuggcucucugga

SEQ ID NO: 12371 - RNA, 20 nt, Artificial Sequence
  targeting sequence with GTCN PAM
uugcaaacaaaguggaaaga

SEQ ID NO: 12372 - RNA, 20 nt, Artificial Sequence
  targeting sequence with GTCN PAM
aaaguugaugcucuuuccac

SEQ ID NO: 12373 - RNA, 20 nt, Artificial Sequence
  targeting sequence with GTCN PAM
auacugggaagaaacaaagg

SEQ ID NO: 12374 - RNA, 20 nt, Artificial Sequence
  targeting sequence with GTCN PAM
ugccacauguacaaucugag

SEQ ID NO: 12375 - RNA, 20 nt, Artificial Sequence
  targeting sequence with GTCN PAM
aguugauuucuugaacaugg

SEQ ID NO: 12376 - RNA, 20 nt, Artificial Sequence
  targeting sequence with GTCN PAM
uauagguacauucagaauuc

SEQ ID NO: 12377 - RNA, 20 nt, Artificial Sequence
  targeting sequence with GTCN PAM
uugcaaacuuaaaaccugaa

SEQ ID NO: 12378 - RNA, 20 nt, Artificial Sequence
  targeting sequence with GTCN PAM
agccuacaugcauuucaagg

SEQ ID NO: 12379 - RNA, 20 nt, Artificial Sequence
  targeting sequence with GTCN PAM
gugugcagggugcauaaagg

SEQ ID NO: 12380 - RNA, 20 nt, Artificial Sequence
  targeting sequence with GTCN PAM
aggcuaaguuuagaaggcug

SEQ ID NO: 12381 - RNA, 20 nt, Artificial Sequence
  targeting sequence with GTCN PAM
acaguaggauugauucagaa

SEQ ID NO: 12382 - RNA, 20 nt, Artificial Sequence
  targeting sequence with GTCN PAM
cacuggucagcaggagacaa

SEQ ID NO: 12383 - RNA, 20 nt, Artificial Sequence
  targeting sequence with GTCN PAM
gcaggagacaagguggaccc

SEQ ID NO: 12384 - RNA, 20 nt, Artificial Sequence
  targeting sequence with GTCN PAM
ccugcugaccagugagacuu

SEQ ID NO: 12385 - RNA, 20 nt, Artificial Sequence
  targeting sequence with GTCN PAM
accuugucuccugcugacca

SEQ ID NO: 12386 - RNA, 20 nt, Artificial Sequence
  targeting sequence with GTCN PAM
ggcaucccacgcagggugag

SEQ ID NO: 12387 - RNA, 20 nt, Artificial Sequence
  targeting sequence with GTCN PAM
gauuacgcgcagagggaaga

SEQ ID NO: 12388 - RNA, 20 nt, Artificial Sequence
  targeting sequence with GTCN PAM
ggggguuccguuaauguuua

SEQ ID NO: 12389 - RNA, 20 nt, Artificial Sequence
  targeting sequence with GTCN PAM
gauggggcucugguggcgug

SEQ ID NO: 12390 - RNA, 20 nt, Artificial Sequence
  targeting sequence with GTCN PAM
agcacccacacccuagaagg

SEQ ID NO: 12391 - RNA, 20 nt, Artificial Sequence
  targeting sequence with GTCN PAM
cugcggaaaccuucuagggu

SEQ ID NO: 12392 - RNA, 20 nt, Artificial Sequence
  targeting sequence with GTCN PAM
aggcgcucaugguugcaggc

SEQ ID NO: 12393 - RNA, 20 nt, Artificial Sequence
  targeting sequence with GTCN PAM
gagccuggaggagugagcca

SEQ ID NO: 12394 - RNA, 20 nt, Artificial Sequence
  targeting sequence with GTCN PAM
cacugccuggcucacuccuc

SEQ ID NO: 12395 - RNA, 20 nt, Artificial Sequence
  targeting sequence with GTCN PAM
cggcccgcccgagccagucu

SEQ ID NO: 12396 - RNA, 20 nt, Artificial Sequence
  targeting sequence with GTCN PAM
uugcagcagcggcucccagc

SEQ ID NO: 12397 - RNA, 20 nt, Artificial Sequence
  targeting sequence with GTCN PAM
uccccaccgcaaggcucaag

SEQ ID NO: 12398 - RNA, 20 nt, Artificial Sequence
  targeting sequence with GTCN PAM
acgccggcggcgccuugagc

SEQ ID NO: 12399 - RNA, 20 nt, Artificial Sequence
  targeting sequence with GTCN PAM
ccucgccaggacagcaaccu

SEQ ID NO: 12400 - RNA, 20 nt, Artificial Sequence
  targeting sequence with GTCN PAM
uggcgaggagaccuagaggc

SEQ ID NO: 12401 - RNA, 20 nt, Artificial Sequence
  targeting sequence with GTCN PAM
gcuccaggcgguccuggugg

SEQ ID NO: 12402 - RNA, 20 nt, Artificial Sequence
  targeting sequence with GTCN PAM
ugguggccgcugccacugcu

SEQ ID NO: 12403 - RNA, 20 nt, Artificial Sequence
  targeting sequence with GTCN PAM
cgcgggcgcccgugcgcagg

SEQ ID NO: 12404 - RNA, 20 nt, Artificial Sequence
  targeting sequence with GTCN PAM
uccugcgcacgggcgcccgc

SEQ ID NO: 12405 - RNA, 20 nt, Artificial Sequence
  targeting sequence with GTCN PAM
ucguccuccugcgcacgggc

SEQ ID NO: 12406 - RNA, 20 nt, Artificial Sequence
  targeting sequence with GTCN PAM
ccguccucguccuccugcgc

SEQ ID NO: 12407 - RNA, 20 nt, Artificial Sequence
  targeting sequence with GTCN PAM
uccucggaacgcaaggcuag

SEQ ID NO: 12408 - RNA, 20 nt, Artificial Sequence
  targeting sequence with GTCN PAM
cggcugcggguucgccccgg

SEQ ID NO: 12409 - RNA, 20 nt, Artificial Sequence
  targeting sequence with GTCN PAM
ccgagggcucuucgcuuggc

SEQ ID NO: 12410 - RNA, 20 nt, Artificial Sequence
  targeting sequence with GTCN PAM
ccaagaucgugccaagcgaa

SEQ ID NO: 12411 - RNA, 20 nt, Artificial Sequence
  targeting sequence with GTCN PAM
ucccccgccgccuugccugc

SEQ ID NO: 12412 - RNA, 20 nt, Artificial Sequence
  targeting sequence with GTCN PAM
ccgcucuccaccgugcuccc

SEQ ID NO: 12413 - RNA, 20 nt, Artificial Sequence
  targeting sequence with GTCN PAM
ccaaagagccggccgucccc

SEQ ID NO: 12414 - RNA, 20 nt, Artificial Sequence
  targeting sequence with GTCN PAM
cccaaccccgcgaaccuucc

SEQ ID NO: 12415 - RNA, 20 nt, Artificial Sequence
  targeting sequence with GTCN PAM
cggguagggccuucucucca

SEQ ID NO: 12416 - RNA, 20 nt, Artificial Sequence
  targeting sequence with GTCN PAM
uucccaccccgccccugucu

SEQ ID NO: 12417 - RNA, 20 nt, Artificial Sequence
  targeting sequence with GTCN PAM
uaaagaaauugccucgugcu

SEQ ID NO: 12418 - RNA, 20 nt, Artificial Sequence
  targeting sequence with GTCN PAM
uuuaggacucaggcagggaa

SEQ ID NO: 12419 - RNA, 20 nt, Artificial Sequence
  targeting sequence with GTCN PAM
uaaaggacgccaaugggccu

SEQ ID NO: 12420 - RNA, 20 nt, Artificial Sequence
  targeting sequence with GTCN PAM
caguaccaggcgcaccaccu

SEQ ID NO: 12421 - RNA, 20 nt, Artificial Sequence
  targeting sequence with GTCN PAM
gccgaccgugugcggggcga

SEQ ID NO: 12422 - RNA, 20 nt, Artificial Sequence
  targeting sequence with GTCN PAM
gcagacagccaggugggcug

SEQ ID NO: 12423 - RNA, 20 nt, Artificial Sequence
  targeting sequence with GTCN PAM
cgccccgggaagaagcuucc

SEQ ID NO: 12424 - RNA, 20 nt, Artificial Sequence
  targeting sequence with GTCN PAM
ugggcugguaauacuuagaa

SEQ ID NO: 12425 - RNA, 20 nt, Artificial Sequence
  targeting sequence with GTCN PAM
cccagcuuggagucagaugu

SEQ ID NO: 12426 - RNA, 20 nt, Artificial Sequence
  targeting sequence with GTCN PAM
gaugugggguugaaucuugg

SEQ ID NO: 12427 - RNA, 20 nt, Artificial Sequence
  targeting sequence with GTCN PAM
agcaccacagcuagugagag

SEQ ID NO: 12428 - RNA, 20 nt, Artificial Sequence
  targeting sequence with GTCN PAM
cuuauccuugagccuccauu

SEQ ID NO: 12429 - RNA, 20 nt, Artificial Sequence
  targeting sequence with GTCN PAM
ccucccuuuuaaagauuagg

SEQ ID NO: 12430 - RNA, 20 nt, Artificial Sequence
  targeting sequence with GTCN PAM
cuacggcucaguggcagcag

SEQ ID NO: 12431 - RNA, 20 nt, Artificial Sequence
  targeting sequence with GTCN PAM
acagaacuuucccuucaucu

SEQ ID NO: 12432 - RNA, 20 nt, Artificial Sequence
  targeting sequence with GTCN PAM
cugucugcagugugaccugu

SEQ ID NO: 12433 - RNA, 20 nt, Artificial Sequence
  targeting sequence with GTCN PAM
gcagugugaccuguugguga

SEQ ID NO: 12434 - RNA, 20 nt, Artificial Sequence
  targeting sequence with GTCN PAM
cacugcagacagggacaaaa

SEQ ID NO: 12435 - RNA, 20 nt, Artificial Sequence
  targeting sequence with GTCN PAM
ccaacaggucacacugcaga

SEQ ID NO: 12436 - RNA, 20 nt, Artificial Sequence
  targeting sequence with GTCN PAM
uugcuccaaaccacagcucc

SEQ ID NO: 12437 - RNA, 20 nt, Artificial Sequence
  targeting sequence with GTCN PAM
gagugugcuggguggcagga

SEQ ID NO: 12438 - RNA, 20 nt, Artificial Sequence
  targeting sequence with GTCN PAM
uuacucagcucaguauagcc

SEQ ID NO: 12439 - RNA, 20 nt, Artificial Sequence
  targeting sequence with GTCN PAM
aaggcucagggaacaaggaa

SEQ ID NO: 12440 - RNA, 20 nt, Artificial Sequence
  targeting sequence with GTCN PAM
uacagccucugcuuacucac

SEQ ID NO: 12441 - RNA, 20 nt, Artificial Sequence
  targeting sequence with GTCN PAM
aaaaauuauuuucugcuugc

SEQ ID NO: 12442 - RNA, 20 nt, Artificial Sequence
  targeting sequence with GTCN PAM
ugagaaacugaggcccagag

SEQ ID NO: 12443 - RNA, 20 nt, Artificial Sequence
  targeting sequence with GTCN PAM
ccccaggugcauuagaacug

SEQ ID NO: 12444 - RNA, 20 nt, Artificial Sequence
  targeting sequence with GTCN PAM
guucuggaaacccaguucua

SEQ ID NO: 12445 - RNA, 20 nt, Artificial Sequence
  targeting sequence with GTCN PAM
uugaagcauuaguaggaguu

SEQ ID NO: 12446 - RNA, 20 nt, Artificial Sequence
  targeting sequence with GTCN PAM
ugagaauuuuauucuaggau

SEQ ID NO: 12447 - RNA, 20 nt, Artificial Sequence
  targeting sequence with GTCN PAM
acaguucuuuuucuuuuuuu

SEQ ID NO: 12448 - RNA, 20 nt, Artificial Sequence
  targeting sequence with GTCN PAM
cagcucacugcaacaucugu

SEQ ID NO: 12449 - RNA, 20 nt, Artificial Sequence
  targeting sequence with GTCN PAM
cccggguucaagugguucuc

SEQ ID NO: 12450 - RNA, 20 nt, Artificial Sequence
  targeting sequence with GTCN PAM
caaacuccugaccuccucag

SEQ ID NO: 12451 - RNA, 20 nt, Artificial Sequence
  targeting sequence with GTCN PAM
ggaguuugcgacuagccugg

SEQ ID NO: 12452 - RNA, 20 nt, Artificial Sequence
  targeting sequence with GTCN PAM
gaaauguaaaauguuacgaa

SEQ ID NO: 12453 - RNA, 20 nt, Artificial Sequence
  targeting sequence with GTCN PAM
ggugcuaccaucaaauaaau

SEQ ID NO: 12454 - RNA, 20 nt, Artificial Sequence
  targeting sequence with GTCN PAM
guucacgucaggugcuacca

SEQ ID NO: 12455 - RNA, 20 nt, Artificial Sequence
  targeting sequence with GTCN PAM
gcuuggaagaaucuggagcu

SEQ ID NO: 12456 - RNA, 20 nt, Artificial Sequence
  targeting sequence with GTCN PAM
acccccuuuacccaaagccu

SEQ ID NO: 12457 - RNA, 20 nt, Artificial Sequence
  targeting sequence with GTCN PAM
gaguagaacagaguccaccc

SEQ ID NO: 12458 - RNA, 20 nt, Artificial Sequence
  targeting sequence with GTCN PAM
aagaugcauauauacagaga

SEQ ID NO: 12459 - RNA, 20 nt, Artificial Sequence
  targeting sequence with GTCN PAM
aaacuccaugcuccuccuug

SEQ ID NO: 12460 - RNA, 20 nt, Artificial Sequence
  targeting sequence with GTCN PAM
gccugagagcaguuggagca

SEQ ID NO: 12461 - RNA, 20 nt, Artificial Sequence
  targeting sequence with GTCN PAM
gcuccaacugcucucaggca

SEQ ID NO: 12462 - RNA, 20 nt, Artificial Sequence
  targeting sequence with GTCN PAM
ccuccaaaucucauguggaa

SEQ ID NO: 12463 - RNA, 20 nt, Artificial Sequence
  targeting sequence with GTCN PAM
ucaguguuggaaguggggcc

SEQ ID NO: 12464 - RNA, 20 nt, Artificial Sequence
  targeting sequence with GTCN PAM
ugggggaggaaccccuguga

SEQ ID NO: 12465 - RNA, 20 nt, Artificial Sequence
  targeting sequence with GTCN PAM
uugugauaaugaguaaguuc

SEQ ID NO: 12466 - RNA, 20 nt, Artificial Sequence
  targeting sequence with GTCN PAM
uuuuguguugcuauauaaag

SEQ ID NO: 12467 - RNA, 20 nt, Artificial Sequence
  targeting sequence with GTCN PAM
uaguccuuuuguguugcuau

SEQ ID NO: 12468 - RNA, 20 nt, Artificial Sequence
  targeting sequence with GTCN PAM
aggccacugucuuaguccuu

SEQ ID NO: 12469 - RNA, 20 nt, Artificial Sequence
  targeting sequence with GTCN PAM
ucccuucugccugcauuugu

SEQ ID NO: 12470 - RNA, 20 nt, Artificial Sequence
  targeting sequence with GTCN PAM
cucuugacuuucccagcagg

SEQ ID NO: 12471 - RNA, 20 nt, Artificial Sequence
  targeting sequence with GTCN PAM
agagugacgguuauauaaau

SEQ ID NO: 12472 - RNA, 20 nt, Artificial Sequence
  targeting sequence with GTCN PAM
uagguacuguggucucuaca

SEQ ID NO: 12473 - RNA, 20 nt, Artificial Sequence
  targeting sequence with GTCN PAM
cuacaauacagcagagguau

SEQ ID NO: 12474 - RNA, 20 nt, Artificial Sequence
  targeting sequence with GTCN PAM
cucaaccucucggagccuca

SEQ ID NO: 12475 - RNA, 20 nt, Artificial Sequence
  targeting sequence with GTCN PAM
acgguuuccuggcuccaaag

SEQ ID NO: 12476 - RNA, 20 nt, Artificial Sequence
  targeting sequence with GTCN PAM
gaauaaauugagggaaaaaa

SEQ ID NO: 12477 - RNA, 20 nt, Artificial Sequence
  targeting sequence with GTCN PAM
cuccugguggcccugcccaa

SEQ ID NO: 12478 - RNA, 20 nt, Artificial Sequence
  targeting sequence with GTCN PAM
aguguggcccguaguuccca

SEQ ID NO: 12479 - RNA, 20 nt, Artificial Sequence
  targeting sequence with GTCN PAM
gcauuugguaacuucuuuau

SEQ ID NO: 12480 - RNA, 20 nt, Artificial Sequence
  targeting sequence with GTCN PAM
cuuuuguuguaauuuguaag

SEQ ID NO: 12481 - RNA, 20 nt, Artificial Sequence
  targeting sequence with GTCN PAM
ucauguuccuccuugcaugg

SEQ ID NO: 12482 - RNA, 20 nt, Artificial Sequence
  targeting sequence with GTCN PAM
ccuccuucagcaccaccacg

SEQ ID NO: 12483 - RNA, 20 nt, Artificial Sequence
  targeting sequence with GTCN PAM
gagcgcacugcccgccgccu

SEQ ID NO: 12484 - RNA, 20 nt, Artificial Sequence
  targeting sequence with GTCN PAM
uccauggccuucuuccuggc

SEQ ID NO: 12485 - RNA, 20 nt, Artificial Sequence
  targeting sequence with GTCN PAM
ccacucaucuucaccaggaa

SEQ ID NO: 12486 - RNA, 20 nt, Artificial Sequence
  targeting sequence with GTCN PAM
ccaguguauaugcaguggcc

SEQ ID NO: 12487 - RNA, 20 nt, Artificial Sequence
  targeting sequence with GTCN PAM
ccuucugauuuucagcaaug

SEQ ID NO: 12488 - RNA, 20 nt, Artificial Sequence
  targeting sequence with GTCN PAM
aucuucauuugaaagacgag

SEQ ID NO: 12489 - RNA, 20 nt, Artificial Sequence
  targeting sequence with GTCN PAM
uucaaaugaagauagacgua

SEQ ID NO: 12490 - RNA, 20 nt, Artificial Sequence
  targeting sequence with GTCN PAM
ccucgucuuucaaaugaaga

SEQ ID NO: 12491 - RNA, 20 nt, Artificial Sequence
  targeting sequence with GTCN PAM
ccucugaacuucagucuccu

SEQ ID NO: 12492 - RNA, 20 nt, Artificial Sequence
  targeting sequence with GTCN PAM
gugugguccccucugaacuu

SEQ ID NO: 12493 - RNA, 20 nt, Artificial Sequence
  targeting sequence with GTCN PAM
gccugccagccauucuugug

SEQ ID NO: 12494 - RNA, 20 nt, Artificial Sequence
  targeting sequence with GTCN PAM
cuacagguuuccguaggcag

SEQ ID NO: 12495 - RNA, 20 nt, Artificial Sequence
  targeting sequence with GTCN PAM
uuuuauaaaaaagcaugacu

SEQ ID NO: 12496 - RNA, 20 nt, Artificial Sequence
  targeting sequence with GTCN PAM
ugcuuuuuuauaaaaugacu

SEQ ID NO: 12497 - RNA, 20 nt, Artificial Sequence
  targeting sequence with GTCN PAM
aaaauuccuuugaagcuguu

SEQ ID NO: 12498 - RNA, 20 nt, Artificial Sequence
  targeting sequence with GTCN PAM
cuucuuuaggacaggguggc

SEQ ID NO: 12499 - RNA, 20 nt, Artificial Sequence
  targeting sequence with GTCN PAM
uaaagaagggacuucacucu

SEQ ID NO: 12500 - RNA, 20 nt, Artificial Sequence
  targeting sequence with GTCN PAM
caucuucgguggaggggcag

SEQ ID NO: 12501 - RNA, 20 nt, Artificial Sequence
  targeting sequence with GTCN PAM
ccuuucugccccuccaccga

SEQ ID NO: 12502 - RNA, 20 nt, Artificial Sequence
  targeting sequence with GTCN PAM
uuuucacacugauucuccac

SEQ ID NO: 12503 - RNA, 20 nt, Artificial Sequence
  targeting sequence with GTCN PAM
gcaggaggcuaagaagcacc

SEQ ID NO: 12504 - RNA, 20 nt, Artificial Sequence
  targeting sequence with GTCN PAM
uguccaaggucacacagcgu

SEQ ID NO: 12505 - RNA, 20 nt, Artificial Sequence
  targeting sequence with GTCN PAM
aaggucacacagcguguaau

SEQ ID NO: 12506 - RNA, 20 nt, Artificial Sequence
  targeting sequence with GTCN PAM
cacagcguguaaugggcagg

SEQ ID NO: 12507 - RNA, 20 nt, Artificial Sequence
  targeting sequence with GTCN PAM
gagucuggagucuggaccug

SEQ ID NO: 12508 - RNA, 20 nt, Artificial Sequence
  targeting sequence with GTCN PAM
ggagucuggaccugggucuc

SEQ ID NO: 12509 - RNA, 20 nt, Artificial Sequence
  targeting sequence with GTCN PAM
ggaccugggucuccuagcug

SEQ ID NO: 12510 - RNA, 20 nt, Artificial Sequence
  targeting sequence with GTCN PAM
agacuccagacucugacccu

SEQ ID NO: 12511 - RNA, 20 nt, Artificial Sequence
  targeting sequence with GTCN PAM
ccuagcugcacugcacugcu

SEQ ID NO: 12512 - RNA, 20 nt, Artificial Sequence
  targeting sequence with GTCN PAM
uggcgccacaggccuuggua

SEQ ID NO: 12513 - RNA, 20 nt, Artificial Sequence
  targeting sequence with GTCN PAM
aucccugucauggcgccaca

SEQ ID NO: 12514 - RNA, 20 nt, Artificial Sequence
  targeting sequence with GTCN PAM
cugccuuggaaacccguagu

SEQ ID NO: 12515 - RNA, 20 nt, Artificial Sequence
  targeting sequence with GTCN PAM
aaguagaggagacugacaag

SEQ ID NO: 12516 - RNA, 20 nt, Artificial Sequence
  targeting sequence with GTCN PAM
ccucuacuuagacuacgggu

SEQ ID NO: 12517 - RNA, 20 nt, Artificial Sequence
  targeting sequence with GTCN PAM
gucuccucuacuuagacuac

SEQ ID NO: 12518 - RNA, 20 nt, Artificial Sequence
  targeting sequence with GTCN PAM
augccuuccaucagucugcu

SEQ ID NO: 12519 - RNA, 20 nt, Artificial Sequence
  targeting sequence with GTCN PAM
gcucaacacacguuuaccaa

SEQ ID NO: 12520 - RNA, 20 nt, Artificial Sequence
  targeting sequence with GTCN PAM
ucuucgccucugcagcacac

SEQ ID NO: 12521 - RNA, 20 nt, Artificial Sequence
  targeting sequence with GTCN PAM
cuccuccugaacuguaagcu

SEQ ID NO: 12522 - RNA, 20 nt, Artificial Sequence
  targeting sequence with GTCN PAM
gucucuccuccugaacugua

SEQ ID NO: 12523 - RNA, 20 nt, Artificial Sequence
  targeting sequence with GTCN PAM
cuggucagucucuccuccug

SEQ ID NO: 12524 - RNA, 20 nt, Artificial Sequence
  targeting sequence with GTCN PAM
acuguacuggcagucacugg

SEQ ID NO: 12525 - RNA, 20 nt, Artificial Sequence
  targeting sequence with GTCN PAM
cauagucaacuguacuggca

SEQ ID NO: 12526 - RNA, 20 nt, Artificial Sequence
  targeting sequence with GTCN PAM
cuccccaaggcugagcacau

SEQ ID NO: 12527 - RNA, 20 nt, Artificial Sequence
  targeting sequence with GTCN PAM
ucuggugcuauacggguacc

SEQ ID NO: 12528 - RNA, 20 nt, Artificial Sequence
  targeting sequence with GTCN PAM
agcucucgauggcaaaugcc

SEQ ID NO: 12529 - RNA, 20 nt, Artificial Sequence
  targeting sequence with GTCN PAM
ugcccagccccuuauuggcu

SEQ ID NO: 12530 - RNA, 20 nt, Artificial Sequence
  targeting sequence with GTCN PAM
aacccugagcaaaucccuuc

SEQ ID NO: 12531 - RNA, 20 nt, Artificial Sequence
  targeting sequence with GTCN PAM
uuaaaugaauguuccaauua

SEQ ID NO: 12532 - RNA, 20 nt, Artificial Sequence
  targeting sequence with GTCN PAM
ugaagcauucagcagaugcu

SEQ ID NO: 12533 - RNA, 20 nt, Artificial Sequence
  targeting sequence with GTCN PAM
cuggaugccuucguaucccc

SEQ ID NO: 12534 - RNA, 20 nt, Artificial Sequence
  targeting sequence with GTCN PAM
gaaggguaaggagagggaau

SEQ ID NO: 12535 - RNA, 20 nt, Artificial Sequence
  targeting sequence with GTCN PAM
ggagguagggagggaguggg

SEQ ID NO: 12536 - RNA, 20 nt, Artificial Sequence
  targeting sequence with GTCN PAM
caaaaaaaaaaaaaaauggu

SEQ ID NO: 12537 - RNA, 20 nt, Artificial Sequence
  targeting sequence with GTCN PAM
gggcaacagagucucaaaaa

SEQ ID NO: 12538 - RNA, 20 nt, Artificial Sequence
  targeting sequence with GTCN PAM
cagcuacucgggaggcugag

SEQ ID NO: 12539 - RNA, 20 nt, Artificial Sequence
  targeting sequence with GTCN PAM
cgaacucucgaccucaggug

SEQ ID NO: 12540 - RNA, 20 nt, Artificial Sequence
  targeting sequence with GTCN PAM
agaguucgagaccagccugg

SEQ ID NO: 12541 - RNA, 20 nt, Artificial Sequence
  targeting sequence with GTCN PAM
ccgcucccagcugcugaugc

SEQ ID NO: 12542 - RNA, 20 nt, Artificial Sequence
  targeting sequence with GTCN PAM
uucuaacuccugcuagugcc

SEQ ID NO: 12543 - RNA, 20 nt, Artificial Sequence
  targeting sequence with GTCN PAM
auucuccagccuucuccagc

SEQ ID NO: 12544 - RNA, 20 nt, Artificial Sequence
  targeting sequence with GTCN PAM
ccuagucuauucuccagccu

SEQ ID NO: 12545 - RNA, 20 nt, Artificial Sequence
  targeting sequence with GTCN PAM
ugauuuaggcauggagucca

SEQ ID NO: 12546 - RNA, 20 nt, Artificial Sequence
  targeting sequence with GTCN PAM
agggccugagcuucacucca

SEQ ID NO: 12547 - RNA, 20 nt, Artificial Sequence
  targeting sequence with GTCN PAM
auccugcccagagccuuggc

SEQ ID NO: 12548 - RNA, 20 nt, Artificial Sequence
  targeting sequence with GTCN PAM
gggagccaggcugugccaag

SEQ ID NO: 12549 - RNA, 20 nt, Artificial Sequence
  targeting sequence with GTCN PAM
aguucagaauccuuccuaaa

SEQ ID NO: 12550 - RNA, 20 nt, Artificial Sequence
  targeting sequence with GTCN PAM
ggcauagaggauuccuuuua

SEQ ID NO: 12551 - RNA, 20 nt, Artificial Sequence
  targeting sequence with GTCN PAM
guccuccggggcacuagcag

SEQ ID NO: 12552 - RNA, 20 nt, Artificial Sequence
  targeting sequence with GTCN PAM
uccggggcacuagcagggac

SEQ ID NO: 12553 - RNA, 20 nt, Artificial Sequence
  targeting sequence with GTCN PAM
cugcuagugccccggaggac

SEQ ID NO: 12554 - RNA, 20 nt, Artificial Sequence
  targeting sequence with GTCN PAM
ccacaucccagcccagcagc

SEQ ID NO: 12555 - RNA, 20 nt, Artificial Sequence
  targeting sequence with GTCN PAM
aaauggcuuaagcagagucc

SEQ ID NO: 12556 - RNA, 20 nt, Artificial Sequence
  targeting sequence with GTCN PAM
cccggccucucuggcuucug

SEQ ID NO: 12557 - RNA, 20 nt, Artificial Sequence
  targeting sequence with GTCN PAM
acuacaucgaggaggacucc

SEQ ID NO: 12558 - RNA, 20 nt, Artificial Sequence
  targeting sequence with GTCN PAM
acauggggcaacuucaaggc

SEQ ID NO: 12559 - RNA, 20 nt, Artificial Sequence
  targeting sequence with GTCN PAM
uccucgauguagucgacaug

SEQ ID NO: 12560 - RNA, 20 nt, Artificial Sequence
  targeting sequence with GTCN PAM
uugcccagagcaucccgugg

SEQ ID NO: 12561 - RNA, 20 nt, Artificial Sequence
  targeting sequence with GTCN PAM
uaccggggggcugguauuca

SEQ ID NO: 12562 - RNA, 20 nt, Artificial Sequence
  targeting sequence with GTCN PAM
caaagccccccgagaagugg

SEQ ID NO: 12563 - RNA, 20 nt, Artificial Sequence
  targeting sequence with GTCN PAM
guggaggugcugagucccaa

SEQ ID NO: 12564 - RNA, 20 nt, Artificial Sequence
  targeting sequence with GTCN PAM
cauccccauccccugcagcc

SEQ ID NO: 12565 - RNA, 20 nt, Artificial Sequence
  targeting sequence with GTCN PAM
ugccuuaaaugauccucuuu

SEQ ID NO: 12566 - RNA, 20 nt, Artificial Sequence
  targeting sequence with GTCN PAM
ccaucagaugaacccuccuu

SEQ ID NO: 12567 - RNA, 20 nt, Artificial Sequence
  targeting sequence with GTCN PAM
gcagggcacugggaguuaua

SEQ ID NO: 12568 - RNA, 20 nt, Artificial Sequence
  targeting sequence with GTCN PAM
agucugcagggcacugggag

SEQ ID NO: 12569 - RNA, 20 nt, Artificial Sequence
  targeting sequence with GTCN PAM
aucccauuaaaggaucuggu

SEQ ID NO: 12570 - RNA, 20 nt, Artificial Sequence
  targeting sequence with GTCN PAM
gggaugccucugccuaccuu

SEQ ID NO: 12571 - RNA, 20 nt, Artificial Sequence
  targeting sequence with GTCN PAM
ucccucuaggccuuucuuuc

SEQ ID NO: 12572 - RNA, 20 nt, Artificial Sequence
  targeting sequence with GTCN PAM
gcauucuagcagggacuugc

SEQ ID NO: 12573 - RNA, 20 nt, Artificial Sequence
  targeting sequence with GTCN PAM
cugcuagaaugcagaccguu

SEQ ID NO: 12574 - RNA, 20 nt, Artificial Sequence
  targeting sequence with GTCN PAM
gggaagacucuagaugcacc

SEQ ID NO: 12575 - RNA, 20 nt, Artificial Sequence
  targeting sequence with GTCN PAM
uccccgacugaauugccacc

SEQ ID NO: 12576 - RNA, 20 nt, Artificial Sequence
  targeting sequence with GTCN PAM
aacuagaacccuucauucuc

SEQ ID NO: 12577 - RNA, 20 nt, Artificial Sequence
  targeting sequence with GTCN PAM
ggagcucagcgcagagauga

SEQ ID NO: 12578 - RNA, 20 nt, Artificial Sequence
  targeting sequence with GTCN PAM
augcaacauggugccaggac

SEQ ID NO: 12579 - RNA, 20 nt, Artificial Sequence
  targeting sequence with GTCN PAM
uggcaccauguugcauggac

SEQ ID NO: 12580 - RNA, 20 nt, Artificial Sequence
  targeting sequence with GTCN PAM
uucuugucuguaaaaugggc

SEQ ID NO: 12581 - RNA, 20 nt, Artificial Sequence
  targeting sequence with GTCN PAM
guaaaaugggcacauaaccc

SEQ ID NO: 12582 - RNA, 20 nt, Artificial Sequence
  targeting sequence with GTCN PAM
cuguccuucucacagguugc

SEQ ID NO: 12583 - RNA, 20 nt, Artificial Sequence
  targeting sequence with GTCN PAM
uucucacagguugcugugag

SEQ ID NO: 12584 - RNA, 20 nt, Artificial Sequence
  targeting sequence with GTCN PAM
cacagcaaccugugagaagg

SEQ ID NO: 12585 - RNA, 20 nt, Artificial Sequence
  targeting sequence with GTCN PAM
cacaguagccccccaacuuu

SEQ ID NO: 12586 - RNA, 20 nt, Artificial Sequence
  targeting sequence with GTCN PAM
cacaguuuggguguaugcaa

SEQ ID NO: 12587 - RNA, 20 nt, Artificial Sequence
  targeting sequence with GTCN PAM
gaguugcugccauugcaaca

SEQ ID NO: 12588 - RNA, 20 nt, Artificial Sequence
  targeting sequence with GTCN PAM
cccacacaaacccuuucucc

SEQ ID NO: 12589 - RNA, 20 nt, Artificial Sequence
  targeting sequence with GTCN PAM
gucaugugugcugacccggc

SEQ ID NO: 12590 - RNA, 20 nt, Artificial Sequence
  targeting sequence with GTCN PAM
ugugugcugacccggccugg

SEQ ID NO: 12591 - RNA, 20 nt, Artificial Sequence
  targeting sequence with GTCN PAM
gcacacaugaccgaccaggc

SEQ ID NO: 12592 - RNA, 20 nt, Artificial Sequence
  targeting sequence with GTCN PAM
ucucccuggccacaggcugc

SEQ ID NO: 12593 - RNA, 20 nt, Artificial Sequence
  targeting sequence with GTCN PAM
caccugguuggaaaggaaca

SEQ ID NO: 12594 - RNA, 20 nt, Artificial Sequence
  targeting sequence with GTCN PAM
cugaggcacugauguggagu

SEQ ID NO: 12595 - RNA, 20 nt, Artificial Sequence
  targeting sequence with GTCN PAM
cugauauuagccugcuccgg

SEQ ID NO: 12596 - RNA, 20 nt, Artificial Sequence
  targeting sequence with GTCN PAM
cucuuggucucugauauuag

SEQ ID NO: 12597 - RNA, 20 nt, Artificial Sequence
  targeting sequence with GTCN PAM
cugugauccucugccagugu

SEQ ID NO: 12598 - RNA, 20 nt, Artificial Sequence
  targeting sequence with GTCN PAM
aggcagggacugagaagauc

SEQ ID NO: 12599 - RNA, 20 nt, Artificial Sequence
  targeting sequence with GTCN PAM
cugccuggacuggggucucu

SEQ ID NO: 12600 - RNA, 20 nt, Artificial Sequence
  targeting sequence with GTCN PAM
cagcagugcuaggaaacuaa

SEQ ID NO: 12601 - RNA, 20 nt, Artificial Sequence
  targeting sequence with GTCN PAM
uggaggccagaagccugaau

SEQ ID NO: 12602 - RNA, 20 nt, Artificial Sequence
  targeting sequence with GTCN PAM
gcaggaccacuuucucccgg

SEQ ID NO: 12603 - RNA, 20 nt, Artificial Sequence
  targeting sequence with GTCN PAM
ugccgacacugauucaggcu

SEQ ID NO: 12604 - RNA, 20 nt, Artificial Sequence
  targeting sequence with GTCN PAM
caacagcggcagcacaccaa

SEQ ID NO: 12605 - RNA, 20 nt, Artificial Sequence
  targeting sequence with GTCN PAM
ucacacagccuucucugugu

SEQ ID NO: 12606 - RNA, 20 nt, Artificial Sequence
  targeting sequence with GTCN PAM
cucuccucuucauugucuca

SEQ ID NO: 12607 - RNA, 20 nt, Artificial Sequence
  targeting sequence with GTCN PAM
cauaaggacacuugucauug

SEQ ID NO: 12608 - RNA, 20 nt, Artificial Sequence
  targeting sequence with GTCN PAM
uuaugagacaaugaagagga

SEQ ID NO: 12609 - RNA, 20 nt, Artificial Sequence
  targeting sequence with GTCN PAM
uuggauuuagggcccacugg

SEQ ID NO: 12610 - RNA, 20 nt, Artificial Sequence
  targeting sequence with GTCN PAM
uugcagaugugguuaagguu

SEQ ID NO: 12611 - RNA, 20 nt, Artificial Sequence
  targeting sequence with GTCN PAM
cagccacagguugugggggu

SEQ ID NO: 12612 - RNA, 20 nt, Artificial Sequence
  targeting sequence with GTCN PAM
gcuucuggcccaagggagag

SEQ ID NO: 12613 - RNA, 20 nt, Artificial Sequence
  targeting sequence with GTCN PAM
gugggagguggcaggaaugg

SEQ ID NO: 12614 - RNA, 20 nt, Artificial Sequence
  targeting sequence with GTCN PAM
uaucaagggcuuggcuggag

SEQ ID NO: 12615 - RNA, 20 nt, Artificial Sequence
  targeting sequence with GTCN PAM
uccuggagcuguugggcugg

SEQ ID NO: 12616 - RNA, 20 nt, Artificial Sequence
  targeting sequence with GTCN PAM
ggguuugagggcggcagcca

SEQ ID NO: 12617 - RNA, 20 nt, Artificial Sequence
  targeting sequence with GTCN PAM
cacaguuaagagugcagggu

SEQ ID NO: 12618 - RNA, 20 nt, Artificial Sequence
  targeting sequence with GTCN PAM
cucacccucucugaucuuca

SEQ ID NO: 12619 - RNA, 20 nt, Artificial Sequence
  targeting sequence with GTCN PAM
gguauugagugaggugcugu

SEQ ID NO: 12620 - RNA, 20 nt, Artificial Sequence
  targeting sequence with GTCN PAM
cuucccccaacaguguaucc

SEQ ID NO: 12621 - RNA, 20 nt, Artificial Sequence
  targeting sequence with GTCN PAM
aguagcauuuguuuaaggaa

SEQ ID NO: 12622 - RNA, 20 nt, Artificial Sequence
  targeting sequence with GTCN PAM
uggcuagaacagcgcuuccu

SEQ ID NO: 12623 - RNA, 20 nt, Artificial Sequence
  targeting sequence with GTCN PAM
ccuuugccugguuaauaaug

SEQ ID NO: 12624 - RNA, 20 nt, Artificial Sequence
  targeting sequence with GTCN PAM
aagcaguggaaugaacgugg

SEQ ID NO: 12625 - RNA, 20 nt, Artificial Sequence
  targeting sequence with GTCN PAM
cuucugcacaggccacacuc

SEQ ID NO: 12626 - RNA, 20 nt, Artificial Sequence
  targeting sequence with GTCN PAM
caccagccucggucccuucu

SEQ ID NO: 12627 - RNA, 20 nt, Artificial Sequence
  targeting sequence with GTCN PAM
gaugugaaaggaagaacuug

SEQ ID NO: 12628 - RNA, 20 nt, Artificial Sequence
  targeting sequence with GTCN PAM
gagcuucucaggcguauggc

SEQ ID NO: 12629 - RNA, 20 nt, Artificial Sequence
  targeting sequence with GTCN PAM
ugcuugcauaccuccagagc

SEQ ID NO: 12630 - RNA, 20 nt, Artificial Sequence
  targeting sequence with GTCN PAM
cagggaacuagcagccccug

SEQ ID NO: 12631 - RNA, 20 nt, Artificial Sequence
  targeting sequence with GTCN PAM
cauccgagcugggccccuuu

SEQ ID NO: 12632 - RNA, 20 nt, Artificial Sequence
  targeting sequence with GTCN PAM
ggaggcugcaagcauggcca

SEQ ID NO: 12633 - RNA, 20 nt, Artificial Sequence
  targeting sequence with GTCN PAM
cagcaggacagugggcuggu

SEQ ID NO: 12634 - RNA, 20 nt, Artificial Sequence
  targeting sequence with GTCN PAM
ugcugggacagggucaggag

SEQ ID NO: 12635 - RNA, 20 nt, Artificial Sequence
  targeting sequence with GTCN PAM
caucccugggccuggggugu

SEQ ID NO: 12636 - RNA, 20 nt, Artificial Sequence
  targeting sequence with GTCN PAM
caucaucuugcagcagaacc

SEQ ID NO: 12637 - RNA, 20 nt, Artificial Sequence
  targeting sequence with GTCN PAM
caagcacgggugggaccaga

SEQ ID NO: 12638 - RNA, 20 nt, Artificial Sequence
  targeting sequence with GTCN PAM
cacccgugcuugggaccacc

SEQ ID NO: 12639 - RNA, 20 nt, Artificial Sequence
  targeting sequence with GTCN PAM
uuucuggucccacccgugcu

SEQ ID NO: 12640 - RNA, 20 nt, Artificial Sequence
  targeting sequence with GTCN PAM
ugugugaggagggaacugag

SEQ ID NO: 12641 - RNA, 20 nt, Artificial Sequence
  targeting sequence with GTCN PAM
auguuccucgucguguguga

SEQ ID NO: 12642 - RNA, 20 nt, Artificial Sequence
  targeting sequence with GTCN PAM
agggagggaagcagccucug

SEQ ID NO: 12643 - RNA, 20 nt, Artificial Sequence
  targeting sequence with GTCN PAM
ucuagauaagccuguauucc

SEQ ID NO: 12644 - RNA, 20 nt, Artificial Sequence
  targeting sequence with GTCN PAM
gccaauguauccaguugucc

SEQ ID NO: 12645 - RNA, 20 nt, Artificial Sequence
  targeting sequence with GTCN PAM
cgucagccuggaagcucuga

SEQ ID NO: 12646 - RNA, 20 nt, Artificial Sequence
  targeting sequence with GTCN PAM
gccuggaagcucugagggaa

SEQ ID NO: 12647 - RNA, 20 nt, Artificial Sequence
  targeting sequence with GTCN PAM
gcuccuagcagaggccccgg

SEQ ID NO: 12648 - RNA, 20 nt, Artificial Sequence
  targeting sequence with GTCN PAM
ugugucugccccuucgacau

SEQ ID NO: 12649 - RNA, 20 nt, Artificial Sequence
  targeting sequence with GTCN PAM
gccccuucgacauuccauag

SEQ ID NO: 12650 - RNA, 20 nt, Artificial Sequence
  targeting sequence with GTCN PAM
aaggggcagacacaagacaa

SEQ ID NO: 12651 - RNA, 20 nt, Artificial Sequence
  targeting sequence with GTCN PAM
ccagaugucuucaggucgga

SEQ ID NO: 12652 - RNA, 20 nt, Artificial Sequence
  targeting sequence with GTCN PAM
ucaggucggagcucacagcg

SEQ ID NO: 12653 - RNA, 20 nt, Artificial Sequence
  targeting sequence with GTCN PAM
gagcucacagcgcucucagc

SEQ ID NO: 12654 - RNA, 20 nt, Artificial Sequence
  targeting sequence with GTCN PAM
uugcucucugaguguguuag

SEQ ID NO: 12655 - RNA, 20 nt, Artificial Sequence
  targeting sequence with GTCN PAM
gccucuccucccaggcugug

SEQ ID NO: 12656 - RNA, 20 nt, Artificial Sequence
  targeting sequence with GTCN PAM
uuggcagucugccucuccuc

SEQ ID NO: 12657 - RNA, 20 nt, Artificial Sequence
  targeting sequence with GTCN PAM
cgugggcacuuugguuucuu

SEQ ID NO: 12658 - RNA, 20 nt, Artificial Sequence
  targeting sequence with GTCN PAM
cggcaggaagcuccacugau

SEQ ID NO: 12659 - RNA, 20 nt, Artificial Sequence
  targeting sequence with GTCN PAM
acccugcccuaaggccucca

SEQ ID NO: 12660 - RNA, 20 nt, Artificial Sequence
  targeting sequence with GTCN PAM
ccagccugcacacacacugu

SEQ ID NO: 12661 - RNA, 20 nt, Artificial Sequence
  targeting sequence with GTCN PAM
gaacugugaguccccagccu

SEQ ID NO: 12662 - RNA, 20 nt, Artificial Sequence
  targeting sequence with GTCN PAM
gggcacaguccgaacuguga

SEQ ID NO: 12663 - RNA, 20 nt, Artificial Sequence
  targeting sequence with GTCN PAM
cgcauccucccacccaccca

SEQ ID NO: 12664 - RNA, 20 nt, Artificial Sequence
  targeting sequence with GTCN PAM
gcccccagucccgcauccuc

SEQ ID NO: 12665 - RNA, 20 nt, Artificial Sequence
  targeting sequence with GTCN PAM
ggguguguguaucugugggg

SEQ ID NO: 12666 - RNA, 20 nt, Artificial Sequence
  targeting sequence with GTCN PAM
ggcucacaggcucugucugg

SEQ ID NO: 12667 - RNA, 20 nt, Artificial Sequence
  targeting sequence with GTCN PAM
uuguagauguaauuaagcau

SEQ ID NO: 12668 - RNA, 20 nt, Artificial Sequence
  targeting sequence with GTCN PAM
ugugaugugucuuuaugaga

SEQ ID NO: 12669 - RNA, 20 nt, Artificial Sequence
  targeting sequence with GTCN PAM
uuaugagagaaaggcagagg

SEQ ID NO: 12670 - RNA, 20 nt, Artificial Sequence
  targeting sequence with GTCN PAM
aaucucccucugccuuucuc

SEQ ID NO: 12671 - RNA, 20 nt, Artificial Sequence
  targeting sequence with GTCN PAM
ccacguggccccuccugugu

SEQ ID NO: 12672 - RNA, 20 nt, Artificial Sequence
  targeting sequence with GTCN PAM
uccggcuucugguggcugcu

SEQ ID NO: 12673 - RNA, 20 nt, Artificial Sequence
  targeting sequence with GTCN PAM
gggaauuugugaccgaagcc

SEQ ID NO: 12674 - RNA, 20 nt, Artificial Sequence
  targeting sequence with GTCN PAM
caaauucccagacucagcag

SEQ ID NO: 12675 - RNA, 20 nt, Artificial Sequence
  targeting sequence with GTCN PAM
ugagaugagaaucucuacuc

SEQ ID NO: 12676 - RNA, 20 nt, Artificial Sequence
  targeting sequence with GTCN PAM
ucugaagugccaucugaaca

SEQ ID NO: 12677 - RNA, 20 nt, Artificial Sequence
  targeting sequence with GTCN PAM
ccugagucuucugaagugcc

SEQ ID NO: 12678 - RNA, 20 nt, Artificial Sequence
  targeting sequence with GTCN PAM
aacugcuccugccccagggu

SEQ ID NO: 12679 - RNA, 20 nt, Artificial Sequence
  targeting sequence with GTCN PAM
gucaaacugcuccugcccca

SEQ ID NO: 12680 - RNA, 20 nt, Artificial Sequence
  targeting sequence with GTCN PAM
ugcgccagcggaaauggccu

SEQ ID NO: 12681 - RNA, 20 nt, Artificial Sequence
  targeting sequence with GTCN PAM
uccuuuggccuggcugagag

SEQ ID NO: 12682 - RNA, 20 nt, Artificial Sequence
  targeting sequence with GTCN PAM
cagaaacucucagccaggcc

SEQ ID NO: 12683 - RNA, 20 nt, Artificial Sequence
  targeting sequence with GTCN PAM
agccugcuggauggagaagg

SEQ ID NO: 12684 - RNA, 20 nt, Artificial Sequence
  targeting sequence with GTCN PAM
ugcaugggcgacucccccag

SEQ ID NO: 12685 - RNA, 20 nt, Artificial Sequence
  targeting sequence with GTCN PAM
cccaugcaggacaaagguua

SEQ ID NO: 12686 - RNA, 20 nt, Artificial Sequence
  targeting sequence with GTCN PAM
cuugcagcuuuuaccccagu

SEQ ID NO: 12687 - RNA, 20 nt, Artificial Sequence
  targeting sequence with GTCN PAM
ccgagcgccuacccuacacu

SEQ ID NO: 12688 - RNA, 20 nt, Artificial Sequence
  targeting sequence with GTCN PAM
caaccucagagaaaacaguc

SEQ ID NO: 12689 - RNA, 20 nt, Artificial Sequence
  targeting sequence with GTCN PAM
ccgugagcccuccugguauc

SEQ ID NO: 12690 - RNA, 20 nt, Artificial Sequence
  targeting sequence with GTCN PAM
aagcguucuccacuccacaa

SEQ ID NO: 12691 - RNA, 20 nt, Artificial Sequence
  targeting sequence with GTCN PAM
gggccuccuggcuccagguc

SEQ ID NO: 12692 - RNA, 20 nt, Artificial Sequence
  targeting sequence with GTCN PAM
gagcugcagcuuccugucuc

SEQ ID NO: 12693 - RNA, 20 nt, Artificial Sequence
  targeting sequence with GTCN PAM
cuaaaaugagccggccagcg

SEQ ID NO: 12694 - RNA, 20 nt, Artificial Sequence
  targeting sequence with GTCN PAM
ggccaccugcgcuggccggc

SEQ ID NO: 12695 - RNA, 20 nt, Artificial Sequence
  targeting sequence with GTCN PAM
uuaaaucuuguugucuuucu

SEQ ID NO: 12696 - RNA, 20 nt, Artificial Sequence
  targeting sequence with GTCN PAM
uucuugcagacucggugagc

SEQ ID NO: 12697 - RNA, 20 nt, Artificial Sequence
  targeting sequence with GTCN PAM
gcaagaaagacaacaagauu

SEQ ID NO: 12698 - RNA, 20 nt, Artificial Sequence
  targeting sequence with GTCN PAM
uccugcuccuucauaugaau

SEQ ID NO: 12699 - RNA, 20 nt, Artificial Sequence
  targeting sequence with GTCN PAM
uucuuggcaguagcauugcc

SEQ ID NO: 12700 - RNA, 20 nt, Artificial Sequence
  targeting sequence with GTCN PAM
aaggccaucagcuggcaaug

SEQ ID NO: 12701 - RNA, 20 nt, Artificial Sequence
  targeting sequence with GTCN PAM
augaaauacauuauagaaua

SEQ ID NO: 12702 - RNA, 20 nt, Artificial Sequence
  targeting sequence with GTCN PAM
accuuauaguuaacacacag

SEQ ID NO: 12703 - RNA, 20 nt, Artificial Sequence
  targeting sequence with GTCN PAM
ccuuggaaagacggaggcag

SEQ ID NO: 12704 - RNA, 20 nt, Artificial Sequence
  targeting sequence with GTCN PAM
uuccaaggcgacauuugugg

SEQ ID NO: 12705 - RNA, 20 nt, Artificial Sequence
  targeting sequence with GTCN PAM
aggagauacaccuccaccag

SEQ ID NO: 12706 - RNA, 20 nt, Artificial Sequence
  targeting sequence with GTCN PAM
cucuguaugcuggugucuag

SEQ ID NO: 12707 - RNA, 20 nt, Artificial Sequence
  targeting sequence with GTCN PAM
uggucaccgacuucgagaau

SEQ ID NO: 12708 - RNA, 20 nt, Artificial Sequence
  targeting sequence with GTCN PAM
ccgacuucgagaaugugccc

SEQ ID NO: 12709 - RNA, 20 nt, Artificial Sequence
  targeting sequence with GTCN PAM
gugaccaugacccugcccuc

SEQ ID NO: 12710 - RNA, 20 nt, Artificial Sequence
  targeting sequence with GTCN PAM
uccucgggcacauucucgaa

SEQ ID NO: 12711 - RNA, 20 nt, Artificial Sequence
  targeting sequence with GTCN PAM
cguccuccucgggcacauuc

SEQ ID NO: 12712 - RNA, 20 nt, Artificial Sequence
  targeting sequence with GTCN PAM
guggaagcgggucccguccu

SEQ ID NO: 12713 - RNA, 20 nt, Artificial Sequence
  targeting sequence with GTCN PAM
gaugggagggcugccucugc

SEQ ID NO: 12714 - RNA, 20 nt, Artificial Sequence
  targeting sequence with GTCN PAM
ccacccaccuccaggauggg

SEQ ID NO: 12715 - RNA, 20 nt, Artificial Sequence
  targeting sequence with GTCN PAM
cuguccccucccugccauca

SEQ ID NO: 12716 - RNA, 20 nt, Artificial Sequence
  targeting sequence with GTCN PAM
ccucccugccaucaguugug

SEQ ID NO: 12717 - RNA, 20 nt, Artificial Sequence
  targeting sequence with GTCN PAM
uucucaugugguccuugugu

SEQ ID NO: 12718 - RNA, 20 nt, Artificial Sequence
  targeting sequence with GTCN PAM
uuguguucgucgagcaggcc

SEQ ID NO: 12719 - RNA, 20 nt, Artificial Sequence
  targeting sequence with GTCN PAM
agcaggccagcaagugugac

SEQ ID NO: 12720 - RNA, 20 nt, Artificial Sequence
  targeting sequence with GTCN PAM
cacuugcuggccugcucgac

SEQ ID NO: 12721 - RNA, 20 nt, Artificial Sequence
  targeting sequence with GTCN PAM
uggcacccaccuggcagggg

SEQ ID NO: 12722 - RNA, 20 nt, Artificial Sequence
  targeting sequence with GTCN PAM
gcggccgggaugccggcgug

SEQ ID NO: 12723 - RNA, 20 nt, Artificial Sequence
  targeting sequence with GTCN PAM
ggggccaucacuuaccuaug

SEQ ID NO: 12724 - RNA, 20 nt, Artificial Sequence
  targeting sequence with GTCN PAM
cucuccaucuggaccuggcc

SEQ ID NO: 12725 - RNA, 20 nt, Artificial Sequence
  targeting sequence with GTCN PAM
agauggagagagaccagcgu

SEQ ID NO: 12726 - RNA, 20 nt, Artificial Sequence
  targeting sequence with GTCN PAM
ccuaaccaagaaugcugugg

SEQ ID NO: 12727 - RNA, 20 nt, Artificial Sequence
  targeting sequence with GTCN PAM
ugcagguagcccagggaguu

SEQ ID NO: 12728 - RNA, 20 nt, Artificial Sequence
  targeting sequence with GTCN PAM
aggcugaacucccugggcua

SEQ ID NO: 12729 - RNA, 20 nt, Artificial Sequence
  targeting sequence with GTCN PAM
augaccuuuccacaguucca

SEQ ID NO: 12730 - RNA, 20 nt, Artificial Sequence
  targeting sequence with GTCN PAM
uugacccagggucaaggcug

SEQ ID NO: 12731 - RNA, 20 nt, Artificial Sequence
  targeting sequence with GTCN PAM
uuaugucuuuuguuauguua

SEQ ID NO: 12732 - RNA, 20 nt, Artificial Sequence
  targeting sequence with GTCN PAM
uuuguuauguuaucuucaau

SEQ ID NO: 12733 - RNA, 20 nt, Artificial Sequence
  targeting sequence with GTCN PAM
cuccacauugaagauaacau

SEQ ID NO: 12734 - RNA, 20 nt, Artificial Sequence
  targeting sequence with GTCN PAM
cagagguaugcaagcagaag

SEQ ID NO: 12735 - RNA, 20 nt, Artificial Sequence
  targeting sequence with GTCN PAM
ccuggucucagagguaugca

SEQ ID NO: 12736 - RNA, 20 nt, Artificial Sequence
  targeting sequence with GTCN PAM
ugcaagugagugaguccccu

SEQ ID NO: 12737 - RNA, 20 nt, Artificial Sequence
  targeting sequence with GTCN PAM
cacuggccaggcagaugugg

SEQ ID NO: 12738 - RNA, 20 nt, Artificial Sequence
  targeting sequence with GTCN PAM
ucugccaguuccuccaccac

SEQ ID NO: 12739 - RNA, 20 nt, Artificial Sequence
  targeting sequence with GTCN PAM
agaaaaaguccucugccagu

SEQ ID NO: 12740 - RNA, 20 nt, Artificial Sequence
  targeting sequence with GTCN PAM
cagucuagaaaaaguccucu

SEQ ID NO: 12741 - RNA, 20 nt, Artificial Sequence
  targeting sequence with GTCN PAM
acccagcggccccccuauga

SEQ ID NO: 12742 - RNA, 20 nt, Artificial Sequence
  targeting sequence with GTCN PAM
aguugagaacuaggacucug

SEQ ID NO: 12743 - RNA, 20 nt, Artificial Sequence
  targeting sequence with GTCN PAM
uaguucucaacuggacuuca

SEQ ID NO: 12744 - RNA, 20 nt, Artificial Sequence
  targeting sequence with GTCN PAM
accggcccccagaguccuag

SEQ ID NO: 12745 - RNA, 20 nt, Artificial Sequence
  targeting sequence with GTCN PAM
guaagggagagaacccuccc

SEQ ID NO: 12746 - RNA, 20 nt, Artificial Sequence
  targeting sequence with GTCN PAM
ggccacagaaggaagucagu

SEQ ID NO: 12747 - RNA, 20 nt, Artificial Sequence
  targeting sequence with GTCN PAM
uggggcuggccuugccguag

SEQ ID NO: 12748 - RNA, 20 nt, Artificial Sequence
  targeting sequence with GTCN PAM
acuauuuagcagcuacggca

SEQ ID NO: 12749 - RNA, 20 nt, Artificial Sequence
  targeting sequence with GTCN PAM
agagaggggaggugacugcc

SEQ ID NO: 12750 - RNA, 20 nt, Artificial Sequence
  targeting sequence with GTCN PAM
ccuccccucucuggacuggu

SEQ ID NO: 12751 - RNA, 20 nt, Artificial Sequence
  targeting sequence with GTCN PAM
cacagcucaagcuggggaac

SEQ ID NO: 12752 - RNA, 20 nt, Artificial Sequence
  targeting sequence with GTCN PAM
gcucugggcagcagcuugac

SEQ ID NO: 12753 - RNA, 20 nt, Artificial Sequence
  targeting sequence with GTCN PAM
agcugcugcccagagcugac

SEQ ID NO: 12754 - RNA, 20 nt, Artificial Sequence
  targeting sequence with GTCN PAM
aacacuggcucuggugcugg

SEQ ID NO: 12755 - RNA, 20 nt, Artificial Sequence
  targeting sequence with GTCN PAM
gcccugugcuccaccaguuc

SEQ ID NO: 12756 - RNA, 20 nt, Artificial Sequence
  targeting sequence with GTCN PAM
cagggcagaacugguggagc

SEQ ID NO: 12757 - RNA, 20 nt, Artificial Sequence
  targeting sequence with GTCN PAM
ccugauggggcagaagguua

SEQ ID NO: 12758 - RNA, 20 nt, Artificial Sequence
  targeting sequence with GTCN PAM
caccccuuuauugacugacc

SEQ ID NO: 12759 - RNA, 20 nt, Artificial Sequence
  targeting sequence with GTCN PAM
auaaaggggugggacaggca

SEQ ID NO: 12760 - RNA, 20 nt, Artificial Sequence
  targeting sequence with GTCN PAM
gucaauaaaggggugggaca

SEQ ID NO: 12761 - RNA, 20 nt, Artificial Sequence
  targeting sequence with GTCN PAM
ggucaguuccugaaggucag

SEQ ID NO: 12762 - RNA, 20 nt, Artificial Sequence
  targeting sequence with GTCN PAM
guuccugaaggucagugugu

SEQ ID NO: 12763 - RNA, 20 nt, Artificial Sequence
  targeting sequence with GTCN PAM
guguguggaggggaggcugu

SEQ ID NO: 12764 - RNA, 20 nt, Artificial Sequence
  targeting sequence with GTCN PAM
uccagaggccagagcaccag

SEQ ID NO: 12765 - RNA, 20 nt, Artificial Sequence
  targeting sequence with GTCN PAM
cuucuuuggggucccaguca

SEQ ID NO: 12766 - RNA, 20 nt, Artificial Sequence
  targeting sequence with GTCN PAM
cagucaguguaugggaagcc

SEQ ID NO: 12767 - RNA, 20 nt, Artificial Sequence
  targeting sequence with GTCN PAM
guguaugggaagcccuuauu

SEQ ID NO: 12768 - RNA, 20 nt, Artificial Sequence
  targeting sequence with GTCN PAM
ugcaauaagggcuucccaua

SEQ ID NO: 12769 - RNA, 20 nt, Artificial Sequence
  targeting sequence with GTCN PAM
cuauugccuuccuugccacu

SEQ ID NO: 12770 - RNA, 20 nt, Artificial Sequence
  targeting sequence with GTCN PAM
agucugagcacagagauaag

SEQ ID NO: 12771 - RNA, 20 nt, Artificial Sequence
  targeting sequence with GTCN PAM
gagcacagagauaagcacac

SEQ ID NO: 12772 - RNA, 20 nt, Artificial Sequence
  targeting sequence with GTCN PAM
ggaguucgagaccagccugu

SEQ ID NO: 12773 - RNA, 20 nt, Artificial Sequence
  targeting sequence with GTCN PAM
cgaacuccugaccucaggug

SEQ ID NO: 12774 - RNA, 20 nt, Artificial Sequence
  targeting sequence with GTCN PAM
cuacuaaaaauacaaaaauu

SEQ ID NO: 12775 - RNA, 20 nt, Artificial Sequence
  targeting sequence with GTCN PAM
guaucccagcuacuugggag

SEQ ID NO: 12776 - RNA, 20 nt, Artificial Sequence
  targeting sequence with GTCN PAM
ccuaggaggagcauggcugu

SEQ ID NO: 12777 - RNA, 20 nt, Artificial Sequence
  targeting sequence with GTCN PAM
ccaggagccguggccaagga

SEQ ID NO: 12778 - RNA, 20 nt, Artificial Sequence
  targeting sequence with GTCN PAM
aaugaggugugggagccuuc

SEQ ID NO: 12779 - RNA, 20 nt, Artificial Sequence
  targeting sequence with GTCN PAM
guuccagguccccuugcaca

SEQ ID NO: 12780 - RNA, 20 nt, Artificial Sequence
  targeting sequence with GTCN PAM
ccuugcacaucagggccaga

SEQ ID NO: 12781 - RNA, 20 nt, Artificial Sequence
  targeting sequence with GTCN PAM
ccaggccacugggccagagc

SEQ ID NO: 12782 - RNA, 20 nt, Artificial Sequence
  targeting sequence with GTCN PAM
ggacaucgagaccauccuug

SEQ ID NO: 12783 - RNA, 20 nt, Artificial Sequence
  targeting sequence with GTCN PAM
ugaccucaugauccucccgc

SEQ ID NO: 12784 - RNA, 20 nt, Artificial Sequence
  targeting sequence with GTCN PAM
cgauguccugaccucaugau

SEQ ID NO: 12785 - RNA, 20 nt, Artificial Sequence
  targeting sequence with GTCN PAM
cuacuaaaacuacaaaaaau

SEQ ID NO: 12786 - RNA, 20 nt, Artificial Sequence
  targeting sequence with GTCN PAM
cagcuacucaggaggcugag

SEQ ID NO: 12787 - RNA, 20 nt, Artificial Sequence
  targeting sequence with GTCN PAM
cgcucuauugcccaggcugg

SEQ ID NO: 12788 - RNA, 20 nt, Artificial Sequence
  targeting sequence with GTCN PAM
ggaaagaaaaaaaaaaaaaa

SEQ ID NO: 12789 - RNA, 20 nt, Artificial Sequence
  targeting sequence with GTCN PAM
acaguaacagcucuuuuuuu

SEQ ID NO: 12790 - RNA, 20 nt, Artificial Sequence
  targeting sequence with GTCN PAM
accucaugcuacugucaaca

SEQ ID NO: 12791 - RNA, 20 nt, Artificial Sequence
  targeting sequence with GTCN PAM
uaggcauggagucuuuuaau

SEQ ID NO: 12792 - RNA, 20 nt, Artificial Sequence
  targeting sequence with GTCN PAM
uuuaauucuuuagacaaucc

SEQ ID NO: 12793 - RNA, 20 nt, Artificial Sequence
  targeting sequence with GTCN PAM
aaagaauuaaaagacuccau

SEQ ID NO: 12794 - RNA, 20 nt, Artificial Sequence
  targeting sequence with GTCN PAM
cuguuucacagagggcgggg

SEQ ID NO: 12795 - RNA, 20 nt, Artificial Sequence
  targeting sequence with GTCN PAM
uggcugcccacucaccagcu

SEQ ID NO: 12796 - RNA, 20 nt, Artificial Sequence
  targeting sequence with GTCN PAM
aacacuugcggccacggugg

SEQ ID NO: 12797 - RNA, 20 nt, Artificial Sequence
  targeting sequence with GTCN PAM
gaauauacgaacucagggga

SEQ ID NO: 12798 - RNA, 20 nt, Artificial Sequence
  targeting sequence with GTCN PAM
aagcgucugaauauacgaac

SEQ ID NO: 12799 - RNA, 20 nt, Artificial Sequence
  targeting sequence with GTCN PAM
agguucugcagagaagcaga

SEQ ID NO: 12800 - RNA, 20 nt, Artificial Sequence
  targeting sequence with GTCN PAM
caugagcuugaaacucuuaa

SEQ ID NO: 12801 - RNA, 20 nt, Artificial Sequence
  targeting sequence with GTCN PAM
gaaauccgcagggcaggcca

SEQ ID NO: 12802 - RNA, 20 nt, Artificial Sequence
  targeting sequence with GTCN PAM
uaaggcaguccuggggcaga

SEQ ID NO: 12803 - RNA, 20 nt, Artificial Sequence
  targeting sequence with GTCN PAM
uggggcagaauuccuucuuc

SEQ ID NO: 12804 - RNA, 20 nt, Artificial Sequence
  targeting sequence with GTCN PAM
guucucuuaaggccuucaac

SEQ ID NO: 12805 - RNA, 20 nt, Artificial Sequence
  targeting sequence with GTCN PAM
ucugauuuaaauguuaguca

SEQ ID NO: 12806 - RNA, 20 nt, Artificial Sequence
  targeting sequence with GTCN PAM
caucuaaaaaauauuuucgc

SEQ ID NO: 12807 - RNA, 20 nt, Artificial Sequence
  targeting sequence with GTCN PAM
aaagccaguggaaaugcugc

SEQ ID NO: 12808 - RNA, 20 nt, Artificial Sequence
  targeting sequence with GTCN PAM
ccccaaggggugaccuuggc

SEQ ID NO: 12809 - RNA, 20 nt, Artificial Sequence
  targeting sequence with GTCN PAM
ccccuuggggagaccugcuc

SEQ ID NO: 12810 - RNA, 20 nt, Artificial Sequence
  targeting sequence with GTCN PAM
agccuguggggccacuggug

SEQ ID NO: 12811 - RNA, 20 nt, Artificial Sequence
  targeting sequence with GTCN PAM
ucaacgccgccugccagcgc

SEQ ID NO: 12812 - RNA, 20 nt, Artificial Sequence
  targeting sequence with GTCN PAM
ugcuggucaccgcugccggc

SEQ ID NO: 12813 - RNA, 20 nt, Artificial Sequence
  targeting sequence with GTCN PAM
ccgcugccggcaacuuccgg

SEQ ID NO: 12814 - RNA, 20 nt, Artificial Sequence
  targeting sequence with GTCN PAM
cggaaguugccggcagcggu

SEQ ID NO: 12815 - RNA, 20 nt, Artificial Sequence
  targeting sequence with GTCN PAM
ucagagacccccgccaugcg

SEQ ID NO: 12816 - RNA, 20 nt, Artificial Sequence
  targeting sequence with GTCN PAM
gagacccccgccaugcggga

SEQ ID NO: 12817 - RNA, 20 nt, Artificial Sequence
  targeting sequence with GTCN PAM
cugacgacuccuuccaaagc

SEQ ID NO: 12818 - RNA, 20 nt, Artificial Sequence
  targeting sequence with GTCN PAM
gaauagcaguggccccgcca

SEQ ID NO: 12819 - RNA, 20 nt, Artificial Sequence
  targeting sequence with GTCN PAM
uggccacucucccuccugaa

SEQ ID NO: 12820 - RNA, 20 nt, Artificial Sequence
  targeting sequence with GTCN PAM
ucugguacccgcccccuccc

SEQ ID NO: 12821 - RNA, 20 nt, Artificial Sequence
  targeting sequence with GTCN PAM
ucugcccaauacucuuuggg

SEQ ID NO: 12822 - RNA, 20 nt, Artificial Sequence
  targeting sequence with GTCN PAM
agcucucuccgcggcuccau

SEQ ID NO: 12823 - RNA, 20 nt, Artificial Sequence
  targeting sequence with GTCN PAM
uggagccgcggagagagcug

SEQ ID NO: 12824 - RNA, 20 nt, Artificial Sequence
  targeting sequence with GTCN PAM
gucauggagccgcggagaga

SEQ ID NO: 12825 - RNA, 20 nt, Artificial Sequence
  targeting sequence with GTCN PAM
gagcccucaaccgcucccau

SEQ ID NO: 12826 - RNA, 20 nt, Artificial Sequence
  targeting sequence with GTCN PAM
ccgcagccacacugcaccgg

SEQ ID NO: 12827 - RNA, 20 nt, Artificial Sequence
  targeting sequence with GTCN PAM
guguccccgcagccacacug

SEQ ID NO: 12828 - RNA, 20 nt, Artificial Sequence
  targeting sequence with GTCN PAM
cugccccccagcuccucagg

SEQ ID NO: 12829 - RNA, 20 nt, Artificial Sequence
  targeting sequence with GTCN PAM
cuccucugacccaccacucc

SEQ ID NO: 12830 - RNA, 20 nt, Artificial Sequence
  targeting sequence with GTCN PAM
gaggagggacggucacugcc

SEQ ID NO: 12831 - RNA, 20 nt, Artificial Sequence
  targeting sequence with GTCN PAM
ggacacugcggguaucuagg

SEQ ID NO: 12832 - RNA, 20 nt, Artificial Sequence
  targeting sequence with GTCN PAM
ugacacuggaggaguggugg

SEQ ID NO: 12833 - RNA, 20 nt, Artificial Sequence
  targeting sequence with GTCN PAM
ggaacuucaagucugugugu

SEQ ID NO: 12834 - RNA, 20 nt, Artificial Sequence
  targeting sequence with GTCN PAM
gugugugugcgugcgcgcgc

SEQ ID NO: 12835 - RNA, 20 nt, Artificial Sequence
  targeting sequence with GTCN PAM
gguacgcaucugcucugcaa

SEQ ID NO: 12836 - RNA, 20 nt, Artificial Sequence
  targeting sequence with GTCN PAM
ccccuggccuaucaaggcuu

SEQ ID NO: 12837 - RNA, 20 nt, Artificial Sequence
  targeting sequence with GTCN PAM
ucucaguuuccccccguggc

SEQ ID NO: 12838 - RNA, 20 nt, Artificial Sequence
  targeting sequence with GTCN PAM
cuaccauagccaggcagcau

SEQ ID NO: 12839 - RNA, 20 nt, Artificial Sequence
  targeting sequence with GTCN PAM
gauuuuccuuaggaggggac

SEQ ID NO: 12840 - RNA, 20 nt, Artificial Sequence
  targeting sequence with GTCN PAM
ccuccuaaggaaaaucugac

SEQ ID NO: 12841 - RNA, 20 nt, Artificial Sequence
  targeting sequence with GTCN PAM
cacucaaauguccccuccua

SEQ ID NO: 12842 - RNA, 20 nt, Artificial Sequence
  targeting sequence with GTCN PAM
agcccagcuggcaaggccug

SEQ ID NO: 12843 - RNA, 20 nt, Artificial Sequence
  targeting sequence with GTCN PAM
gccucugcaaccccucucuu

SEQ ID NO: 12844 - RNA, 20 nt, Artificial Sequence
  targeting sequence with GTCN PAM
ucacaguuggggccaccaau

SEQ ID NO: 12845 - RNA, 20 nt, Artificial Sequence
  targeting sequence with GTCN PAM
ugggcauugguggccccaac

SEQ ID NO: 12846 - RNA, 20 nt, Artificial Sequence
  targeting sequence with GTCN PAM
ccggcuggucuugggcauug

SEQ ID NO: 12847 - RNA, 20 nt, Artificial Sequence
  targeting sequence with GTCN PAM
ccagggucaccggcuggucu

SEQ ID NO: 12848 - RNA, 20 nt, Artificial Sequence
  targeting sequence with GTCN PAM
ccaaaguccccagggucacc

SEQ ID NO: 12849 - RNA, 20 nt, Artificial Sequence
  targeting sequence with GTCN PAM
acacagcggccaaaguuggu

SEQ ID NO: 12850 - RNA, 20 nt, Artificial Sequence
  targeting sequence with GTCN PAM
uccccuggggcaaagagguc

SEQ ID NO: 12851 - RNA, 20 nt, Artificial Sequence
  targeting sequence with GTCN PAM
cuggaggcaccaaugauguc

SEQ ID NO: 12852 - RNA, 20 nt, Artificial Sequence
  targeting sequence with GTCN PAM
cagagugggacaucacaggc

SEQ ID NO: 12853 - RNA, 20 nt, Artificial Sequence
  targeting sequence with GTCN PAM
cacucugugacacaaagcag

SEQ ID NO: 12854 - RNA, 20 nt, Artificial Sequence
  targeting sequence with GTCN PAM
ccaccccacugccucggcca

SEQ ID NO: 12855 - RNA, 20 nt, Artificial Sequence
  targeting sequence with GTCN PAM
gggucugugccgggaccucc

SEQ ID NO: 12856 - RNA, 20 nt, Artificial Sequence
  targeting sequence with GTCN PAM
gugccgggaccuccagugcc

SEQ ID NO: 12857 - RNA, 20 nt, Artificial Sequence
  targeting sequence with GTCN PAM
cggcacagacccugacugcc

SEQ ID NO: 12858 - RNA, 20 nt, Artificial Sequence
  targeting sequence with GTCN PAM
cccugcacagagccuggcac

SEQ ID NO: 12859 - RNA, 20 nt, Artificial Sequence
  targeting sequence with GTCN PAM
uugaaggcaccaucaggccu

SEQ ID NO: 12860 - RNA, 20 nt, Artificial Sequence
  targeting sequence with GTCN PAM
gaugagggaggcgagugcac

SEQ ID NO: 12861 - RNA, 20 nt, Artificial Sequence
  targeting sequence with GTCN PAM
gggcuguauuagagggagcc

SEQ ID NO: 12862 - RNA, 20 nt, Artificial Sequence
  targeting sequence with GTCN PAM
gagaaggcaucuuggaggag

SEQ ID NO: 12863 - RNA, 20 nt, Artificial Sequence
  targeting sequence with GTCN PAM
cuccuccaagaugccuucuc

SEQ ID NO: 12864 - RNA, 20 nt, Artificial Sequence
  targeting sequence with GTCN PAM
uaucggccaggugaacuccu

SEQ ID NO: 12865 - RNA, 20 nt, Artificial Sequence
  targeting sequence with GTCN PAM
uaccucacugaguaaggacu

SEQ ID NO: 12866 - RNA, 20 nt, Artificial Sequence
  targeting sequence with GTCN PAM
uuacucagugagguaagaca

SEQ ID NO: 12867 - RNA, 20 nt, Artificial Sequence
  targeting sequence with GTCN PAM
gugugcacguguguuugugu

SEQ ID NO: 12868 - RNA, 20 nt, Artificial Sequence
  targeting sequence with GTCN PAM
ccugcuggggcaggagggcc

SEQ ID NO: 12869 - RNA, 20 nt, Artificial Sequence
  targeting sequence with GTCN PAM
gccgagccggagcucacccu

SEQ ID NO: 12870 - RNA, 20 nt, Artificial Sequence
  targeting sequence with GTCN PAM
cugccucaacucggccaggg

SEQ ID NO: 12871 - RNA, 20 nt, Artificial Sequence
  targeting sequence with GTCN PAM
ucaaugaggccugguucccu

SEQ ID NO: 12872 - RNA, 20 nt, Artificial Sequence
  targeting sequence with GTCN PAM
ucagggaaccaggccucauu

SEQ ID NO: 12873 - RNA, 20 nt, Artificial Sequence
  targeting sequence with GTCN PAM
guacccgcugguccucaggg

SEQ ID NO: 12874 - RNA, 20 nt, Artificial Sequence
  targeting sequence with GTCN PAM
aggcuggggcuugggagguc

SEQ ID NO: 12875 - RNA, 20 nt, Artificial Sequence
  targeting sequence with GTCN PAM
gugugaccuugacagucucu

SEQ ID NO: 12876 - RNA, 20 nt, Artificial Sequence
  targeting sequence with GTCN PAM
cacagaccucccaagcccca

SEQ ID NO: 12877 - RNA, 20 nt, Artificial Sequence
  targeting sequence with GTCN PAM
aggucacacagaccucccaa

SEQ ID NO: 12878 - RNA, 20 nt, Artificial Sequence
  targeting sequence with GTCN PAM
cucccuucucccuugucugu

SEQ ID NO: 12879 - RNA, 20 nt, Artificial Sequence
  targeting sequence with GTCN PAM
guguaaggaggaugacgcca

SEQ ID NO: 12880 - RNA, 20 nt, Artificial Sequence
  targeting sequence with GTCN PAM
uccuccuuacacagacaagg

SEQ ID NO: 12881 - RNA, 20 nt, Artificial Sequence
  targeting sequence with GTCN PAM
cuauaaaaacacguuaugaa

SEQ ID NO: 12882 - RNA, 20 nt, Artificial Sequence
  targeting sequence with GTCN PAM
ccucacucccagcacccccu

SEQ ID NO: 12883 - RNA, 20 nt, Artificial Sequence
  targeting sequence with GTCN PAM
ugcaaaacagcugccaaccu

SEQ ID NO: 12884 - RNA, 20 nt, Artificial Sequence
  targeting sequence with GTCN PAM
gcacacucggggccuacacg

SEQ ID NO: 12885 - RNA, 20 nt, Artificial Sequence
  targeting sequence with GTCN PAM
cccgcugcgccccagaugag

SEQ ID NO: 12886 - RNA, 20 nt, Artificial Sequence
  targeting sequence with GTCN PAM
ccuccaugcgcucgccccgc

SEQ ID NO: 12887 - RNA, 20 nt, Artificial Sequence
  targeting sequence with GTCN PAM
gugcugggcccucagggacc

SEQ ID NO: 12888 - RNA, 20 nt, Artificial Sequence
  targeting sequence with GTCN PAM
cugagggcccagcacugaca

SEQ ID NO: 12889 - RNA, 20 nt, Artificial Sequence
  targeting sequence with GTCN PAM
ggaggauggaggggcuugcu

SEQ ID NO: 12890 - RNA, 20 nt, Artificial Sequence
  targeting sequence with GTCN PAM
ggccagcccuguaagcuuac

SEQ ID NO: 12891 - RNA, 20 nt, Artificial Sequence
  targeting sequence with GTCN PAM
ugcagccucuaggaaacccu

SEQ ID NO: 12892 - RNA, 20 nt, Artificial Sequence
  targeting sequence with GTCN PAM
gcgaucugcuacucuggacu

SEQ ID NO: 12893 - RNA, 20 nt, Artificial Sequence
  targeting sequence with GTCN PAM
agaguagcagaucgcugacc

SEQ ID NO: 12894 - RNA, 20 nt, Artificial Sequence
  targeting sequence with GTCN PAM
uaaugcucgugugagaggca

SEQ ID NO: 12895 - RNA, 20 nt, Artificial Sequence
  targeting sequence with GTCN PAM
uccuugggcaggagugagcu

SEQ ID NO: 12896 - RNA, 20 nt, Artificial Sequence
  targeting sequence with GTCN PAM
ccagaaggcugggucuggcu

SEQ ID NO: 12897 - RNA, 20 nt, Artificial Sequence
  targeting sequence with GTCN PAM
ggcuggccccuggcagggac

SEQ ID NO: 12898 - RNA, 20 nt, Artificial Sequence
  targeting sequence with GTCN PAM
cugccaggggccagccagac

SEQ ID NO: 12899 - RNA, 20 nt, Artificial Sequence
  targeting sequence with GTCN PAM
agucccuuucuguguuuuca

SEQ ID NO: 12900 - RNA, 20 nt, Artificial Sequence
  targeting sequence with GTCN PAM
cuuucuguguuuucaaagcc

SEQ ID NO: 12901 - RNA, 20 nt, Artificial Sequence
  targeting sequence with GTCN PAM
uugacucuaaggcccaaggg

SEQ ID NO: 12902 - RNA, 20 nt, Artificial Sequence
  targeting sequence with GTCN PAM
aagacggaaaugggaaucug

SEQ ID NO: 12903 - RNA, 20 nt, Artificial Sequence
  targeting sequence with GTCN PAM
gccgggcccacaacgcuuuu

SEQ ID NO: 12904 - RNA, 20 nt, Artificial Sequence
  targeting sequence with GTCN PAM
acgccauugccaggugcugc

SEQ ID NO: 12905 - RNA, 20 nt, Artificial Sequence
  targeting sequence with GTCN PAM
acacagcuccaccagcugag

SEQ ID NO: 12906 - RNA, 20 nt, Artificial Sequence
  targeting sequence with GTCN PAM
ccaugcuggccucagcuggu

SEQ ID NO: 12907 - RNA, 20 nt, Artificial Sequence
  targeting sequence with GTCN PAM
acugccaccaacagggccac

SEQ ID NO: 12908 - RNA, 20 nt, Artificial Sequence
  targeting sequence with GTCN PAM
ucacagguaggaggcugggc

SEQ ID NO: 12909 - RNA, 20 nt, Artificial Sequence
  targeting sequence with GTCN PAM
cuuucuccuuaugcacccac

SEQ ID NO: 12910 - RNA, 20 nt, Artificial Sequence
  targeting sequence with GTCN PAM
ucacaagugugauccaugag

SEQ ID NO: 12911 - RNA, 20 nt, Artificial Sequence
  targeting sequence with GTCN PAM
cauggaucacacuugugagg

SEQ ID NO: 12912 - RNA, 20 nt, Artificial Sequence
  targeting sequence with GTCN PAM
ggcuugagucucauggauca

SEQ ID NO: 12913 - RNA, 20 nt, Artificial Sequence
  targeting sequence with GTCN PAM
ccugcccaggcucaaagggc

SEQ ID NO: 12914 - RNA, 20 nt, Artificial Sequence
  targeting sequence with GTCN PAM
aggagaggcagcuccagaga

SEQ ID NO: 12915 - RNA, 20 nt, Artificial Sequence
  targeting sequence with GTCN PAM
gcccuccuuucagccccagc

SEQ ID NO: 12916 - RNA, 20 nt, Artificial Sequence
  targeting sequence with GTCN PAM
cacagcuauagagcggcagg

SEQ ID NO: 12917 - RNA, 20 nt, Artificial Sequence
  targeting sequence with GTCN PAM
cggcacuaagcuaagugcuu

SEQ ID NO: 12918 - RNA, 20 nt, Artificial Sequence
  targeting sequence with GTCN PAM
auaguugccuauaccagagg

SEQ ID NO: 12919 - RNA, 20 nt, Artificial Sequence
  targeting sequence with GTCN PAM
aaaacaugcccaggcaggua

SEQ ID NO: 12920 - RNA, 20 nt, Artificial Sequence
  targeting sequence with GTCN PAM
cagauggggaccucuugggg

SEQ ID NO: 12921 - RNA, 20 nt, Artificial Sequence
  targeting sequence with GTCN PAM
ccaucugugacuuccugcua

SEQ ID NO: 12922 - RNA, 20 nt, Artificial Sequence
  targeting sequence with GTCN PAM
gggaagacagugggacucca

SEQ ID NO: 12923 - RNA, 20 nt, Artificial Sequence
  targeting sequence with GTCN PAM
ucccagaccucucaugcucc

SEQ ID NO: 12924 - RNA, 20 nt, Artificial Sequence
  targeting sequence with GTCN PAM
cacugucuucccagaccucu

SEQ ID NO: 12925 - RNA, 20 nt, Artificial Sequence
  targeting sequence with GTCN PAM
gagcacguccaggggaacca

SEQ ID NO: 12926 - RNA, 20 nt, Artificial Sequence
  targeting sequence with GTCN PAM
aggggaaccacugaggguuu

SEQ ID NO: 12927 - RNA, 20 nt, Artificial Sequence
  targeting sequence with GTCN PAM
gguggcuggugcccuugucc

SEQ ID NO: 12928 - RNA, 20 nt, Artificial Sequence
  targeting sequence with GTCN PAM
aggggagaggcuccgucagg

SEQ ID NO: 12929 - RNA, 20 nt, Artificial Sequence
  targeting sequence with GTCN PAM
gguucagggguccuggcuug

SEQ ID NO: 12930 - RNA, 20 nt, Artificial Sequence
  targeting sequence with GTCN PAM
uggcuuggagggaaguccgc

SEQ ID NO: 12931 - RNA, 20 nt, Artificial Sequence
  targeting sequence with GTCN PAM
gccaugcucuaaucacgcuc

SEQ ID NO: 12932 - RNA, 20 nt, Artificial Sequence
  targeting sequence with GTCN PAM
guuugaagucauggaaucug

SEQ ID NO: 12933 - RNA, 20 nt, Artificial Sequence
  targeting sequence with GTCN PAM
uggaaucugacuccaugaag

SEQ ID NO: 12934 - RNA, 20 nt, Artificial Sequence
  targeting sequence with GTCN PAM
gauuccaugacuucaaacug

SEQ ID NO: 12935 - RNA, 20 nt, Artificial Sequence
  targeting sequence with GTCN PAM
agccugcaguucccuuagcu

SEQ ID NO: 12936 - RNA, 20 nt, Artificial Sequence
  targeting sequence with GTCN PAM
uagcugcaagggcucggggc

SEQ ID NO: 12937 - RNA, 20 nt, Artificial Sequence
  targeting sequence with GTCN PAM
ucuucacagugucccuguga

SEQ ID NO: 12938 - RNA, 20 nt, Artificial Sequence
  targeting sequence with GTCN PAM
cugugaguaggugugguuuc

SEQ ID NO: 12939 - RNA, 20 nt, Artificial Sequence
  targeting sequence with GTCN PAM
gacuccuaagcccauggagg

SEQ ID NO: 12940 - RNA, 20 nt, Artificial Sequence
  targeting sequence with GTCN PAM
gacacacccauuggcuaaga

SEQ ID NO: 12941 - RNA, 20 nt, Artificial Sequence
  targeting sequence with GTCN PAM
gaaccaccucagaaugcccu

SEQ ID NO: 12942 - RNA, 20 nt, Artificial Sequence
  targeting sequence with GTCN PAM
gucugaaccaccucagaaug

SEQ ID NO: 12943 - RNA, 20 nt, Artificial Sequence
  targeting sequence with GTCN PAM
ccaucucuggguggaaagau

SEQ ID NO: 12944 - RNA, 20 nt, Artificial Sequence
  targeting sequence with GTCN PAM
cacagcuggucagcugcaga

SEQ ID NO: 12945 - RNA, 20 nt, Artificial Sequence
  targeting sequence with GTCN PAM
gcugcagaguugagaacaca

SEQ ID NO: 12946 - RNA, 20 nt, Artificial Sequence
  targeting sequence with GTCN PAM
uggugcucaggccagcaucu

SEQ ID NO: 12947 - RNA, 20 nt, Artificial Sequence
  targeting sequence with GTCN PAM
gaggcaagagcuaggaaacc

SEQ ID NO: 12948 - RNA, 20 nt, Artificial Sequence
  targeting sequence with GTCN PAM
gauggggaugggcacuggag

SEQ ID NO: 12949 - RNA, 20 nt, Artificial Sequence
  targeting sequence with GTCN PAM
ccagugcccauccccaucag

SEQ ID NO: 12950 - RNA, 20 nt, Artificial Sequence
  targeting sequence with GTCN PAM
uccaccucccagugggagcu

SEQ ID NO: 12951 - RNA, 20 nt, Artificial Sequence
  targeting sequence with GTCN PAM
gcccaaccagugcgugggcc

SEQ ID NO: 12952 - RNA, 20 nt, Artificial Sequence
  targeting sequence with GTCN PAM
ggaaugcaaagucaaggagc

SEQ ID NO: 12953 - RNA, 20 nt, Artificial Sequence
  targeting sequence with GTCN PAM
aggagcauggaaucccggcc

SEQ ID NO: 12954 - RNA, 20 nt, Artificial Sequence
  targeting sequence with GTCN PAM
cuccugcacagcuuuucugu

SEQ ID NO: 12955 - RNA, 20 nt, Artificial Sequence
  targeting sequence with GTCN PAM
guuugugccaccaccauacc

SEQ ID NO: 12956 - RNA, 20 nt, Artificial Sequence
  targeting sequence with GTCN PAM
acacaauggcggaagcugcc

SEQ ID NO: 12957 - RNA, 20 nt, Artificial Sequence
  targeting sequence with GTCN PAM
cuguguggcugggucuguuu

SEQ ID NO: 12958 - RNA, 20 nt, Artificial Sequence
  targeting sequence with GTCN PAM
guuuuugcuuuuguccagau

SEQ ID NO: 12959 - RNA, 20 nt, Artificial Sequence
  targeting sequence with GTCN PAM
agaucaguaagguuugcuac

SEQ ID NO: 12960 - RNA, 20 nt, Artificial Sequence
  targeting sequence with GTCN PAM
ugcuguguugcccaggcugg

SEQ ID NO: 12961 - RNA, 20 nt, Artificial Sequence
  targeting sequence with GTCN PAM
caaauuccugggcucaagca

SEQ ID NO: 12962 - RNA, 20 nt, Artificial Sequence
  targeting sequence with GTCN PAM
cagccuccccaaguguuggg

SEQ ID NO: 12963 - RNA, 20 nt, Artificial Sequence
  targeting sequence with GTCN PAM
cagggucaggagcagcacug

SEQ ID NO: 12964 - RNA, 20 nt, Artificial Sequence
  targeting sequence with GTCN PAM
ggagcagcacugggcucuga

SEQ ID NO: 12965 - RNA, 20 nt, Artificial Sequence
  targeting sequence with GTCN PAM
ucagagcccagugcugcucc

SEQ ID NO: 12966 - RNA, 20 nt, Artificial Sequence
  targeting sequence with GTCN PAM
cggcugagugagcucugugu

SEQ ID NO: 12967 - RNA, 20 nt, Artificial Sequence
  targeting sequence with GTCN PAM
ugcuaacaaccuucagcaug

SEQ ID NO: 12968 - RNA, 20 nt, Artificial Sequence
  targeting sequence with GTCN PAM
cauuccagggcuuggcacau

SEQ ID NO: 12969 - RNA, 20 nt, Artificial Sequence
  targeting sequence with GTCN PAM
acucuuaaaugaacucagag

SEQ ID NO: 12970 - RNA, 20 nt, Artificial Sequence
  targeting sequence with GTCN PAM
guuuuaaaaugcaagucugu

SEQ ID NO: 12971 - RNA, 20 nt, Artificial Sequence
  targeting sequence with GTCN PAM
guguugauucuggucuggau

SEQ ID NO: 12972 - RNA, 20 nt, Artificial Sequence
  targeting sequence with GTCN PAM
ggauggugcauuccucgaga

SEQ ID NO: 12973 - RNA, 20 nt, Artificial Sequence
  targeting sequence with GTCN PAM
uuugcucucgaggaaugcac

SEQ ID NO: 12974 - RNA, 20 nt, Artificial Sequence
  targeting sequence with GTCN PAM
uggucuuggauccacuugcc

SEQ ID NO: 12975 - RNA, 20 nt, Artificial Sequence
  targeting sequence with GTCN PAM
uggauccacuugcccugggu

SEQ ID NO: 12976 - RNA, 20 nt, Artificial Sequence
  targeting sequence with GTCN PAM
cuugggccuguaucccuccc

SEQ ID NO: 12977 - RNA, 20 nt, Artificial Sequence
  targeting sequence with GTCN PAM
uccuccacuaaaauagaugc

SEQ ID NO: 12978 - RNA, 20 nt, Artificial Sequence
  targeting sequence with GTCN PAM
ggagaggucucgcugacaag

SEQ ID NO: 12979 - RNA, 20 nt, Artificial Sequence
  targeting sequence with GTCN PAM
cgcugacaagguggacgaaa

SEQ ID NO: 12980 - RNA, 20 nt, Artificial Sequence
  targeting sequence with GTCN PAM
gcgagaccucuccugaccuc

SEQ ID NO: 12981 - RNA, 20 nt, Artificial Sequence
  targeting sequence with GTCN PAM
accuugucagcgagaccucu

SEQ ID NO: 12982 - RNA, 20 nt, Artificial Sequence
  targeting sequence with GTCN PAM
ccucugaggcaccccccauc

SEQ ID NO: 12983 - RNA, 20 nt, Artificial Sequence
  targeting sequence with GTCN PAM
ggugagaccugagggucaca

SEQ ID NO: 12984 - RNA, 20 nt, Artificial Sequence
  targeting sequence with GTCN PAM
caccugacuuggcccugucc

SEQ ID NO: 12985 - RNA, 20 nt, Artificial Sequence
  targeting sequence with GTCN PAM
cagucagcagugagcugggg

SEQ ID NO: 12986 - RNA, 20 nt, Artificial Sequence
  targeting sequence with GTCN PAM
gcagugagcuggggccaugc

SEQ ID NO: 12987 - RNA, 20 nt, Artificial Sequence
  targeting sequence with GTCN PAM
ggccucagaggagugugguc

SEQ ID NO: 12988 - RNA, 20 nt, Artificial Sequence
  targeting sequence with GTCN PAM
ggccuggaucugaaccucuc

SEQ ID NO: 12989 - RNA, 20 nt, Artificial Sequence
  targeting sequence with GTCN PAM
ucucuucucagcucagcagc

SEQ ID NO: 12990 - RNA, 20 nt, Artificial Sequence
  targeting sequence with GTCN PAM
uugucaucucuucucagcuc

SEQ ID NO: 12991 - RNA, 20 nt, Artificial Sequence
  targeting sequence with GTCN PAM
cccugcuucugcccaagguc

SEQ ID NO: 12992 - RNA, 20 nt, Artificial Sequence
  targeting sequence with GTCN PAM
aggcguuggggcggggcuca

SEQ ID NO: 12993 - RNA, 20 nt, Artificial Sequence
  targeting sequence with GTCN PAM
gaagggagccugcaggccug

SEQ ID NO: 12994 - RNA, 20 nt, Artificial Sequence
  targeting sequence with GTCN PAM
aggggcccgagccuuggugc

SEQ ID NO: 12995 - RNA, 20 nt, Artificial Sequence
  targeting sequence with GTCN PAM
aucuccacggcccucaaacc

SEQ ID NO: 12996 - RNA, 20 nt, Artificial Sequence
  targeting sequence with GTCN PAM
gccauggugcagaaccgccu

SEQ ID NO: 12997 - RNA, 20 nt, Artificial Sequence
  targeting sequence with GTCN PAM
caaaugggcucugagccagc

SEQ ID NO: 12998 - RNA, 20 nt, Artificial Sequence
  targeting sequence with GTCN PAM
gcacuuuggccucacagaag

SEQ ID NO: 12999 - RNA, 20 nt, Artificial Sequence
  targeting sequence with GTCN PAM
gagggagaaaugaagugugg

SEQ ID NO: 13000 - RNA, 20 nt, Artificial Sequence
  targeting sequence with GTCN PAM
cgggccacgcuagacaugug

SEQ ID NO: 13001 - RNA, 20 nt, Artificial Sequence
  targeting sequence with GTCN PAM
agcguggcccgggaccccca

SEQ ID NO: 13002 - RNA, 20 nt, Artificial Sequence
  targeting sequence with GTCN PAM
ccugccagagcccgaggaaa

SEQ ID NO: 13003 - RNA, 20 nt, Artificial Sequence
  targeting sequence with GTCN PAM
agcccuccucgcaggccacg

SEQ ID NO: 13004 - RNA, 20 nt, Artificial Sequence
  targeting sequence with GTCN PAM
ggguccagcccuccucgcag

SEQ ID NO: 13005 - RNA, 20 nt, Artificial Sequence
  targeting sequence with GTCN PAM
cagggagggcacugcagcca

SEQ ID NO: 13006 - RNA, 20 nt, Artificial Sequence
  targeting sequence with GTCN PAM
ugggggccuacgccguagac

SEQ ID NO: 13007 - RNA, 20 nt, Artificial Sequence
  targeting sequence with GTCN PAM
acggcguaggcccccaggac

SEQ ID NO: 13008 - RNA, 20 nt, Artificial Sequence
  targeting sequence with GTCN PAM
ggagccgggacgucagcacu

SEQ ID NO: 13009 - RNA, 20 nt, Artificial Sequence
  targeting sequence with GTCN PAM
cggcuccugacuacacacgu

SEQ ID NO: 13010 - RNA, 20 nt, Artificial Sequence
  targeting sequence with GTCN PAM
gcacuacaggcagcaccagc

SEQ ID NO: 13011 - RNA, 20 nt, Artificial Sequence
  targeting sequence with GTCN PAM
cggccccuucgcuggugcug

SEQ ID NO: 13012 - RNA, 20 nt, Artificial Sequence
  targeting sequence with GTCN PAM
cuggagcuccugggaggccu

SEQ ID NO: 13013 - RNA, 20 nt, Artificial Sequence
  targeting sequence with GTCN PAM
ggggagggucaagggcuggg

SEQ ID NO: 13014 - RNA, 20 nt, Artificial Sequence
  targeting sequence with GTCN PAM
agggcuggggcugagcuuua

SEQ ID NO: 13015 - RNA, 20 nt, Artificial Sequence
  targeting sequence with GTCN PAM
gaaccauuuuaaagcucagc

SEQ ID NO: 13016 - RNA, 20 nt, Artificial Sequence
  targeting sequence with GTCN PAM
cucucucagcccuccauggc

SEQ ID NO: 13017 - RNA, 20 nt, Artificial Sequence
  targeting sequence with GTCN PAM
agcugugcucgggugcugcc

SEQ ID NO: 13018 - RNA, 20 nt, Artificial Sequence
  targeting sequence with GTCN PAM
gugggcagaaugacuuuuau

SEQ ID NO: 13019 - RNA, 20 nt, Artificial Sequence
  targeting sequence with GTCN PAM
uucugcccacggacaucggc

SEQ ID NO: 13020 - RNA, 20 nt, Artificial Sequence
  targeting sequence with GTCN PAM
ccaccaaggaggcaggauuc

SEQ ID NO: 13021 - RNA, 20 nt, Artificial Sequence
  targeting sequence with GTCN PAM
cugcagccccuaccgccccc

SEQ ID NO: 13022 - RNA, 20 nt, Artificial Sequence
  targeting sequence with GTCN PAM
ccagccucuggcuagaugcc

SEQ ID NO: 13023 - RNA, 20 nt, Artificial Sequence
  targeting sequence with GTCN PAM
caggcugugccuugguuucc

SEQ ID NO: 13024 - RNA, 20 nt, Artificial Sequence
  targeting sequence with GTCN PAM
uaggugauggcuccccgcag

SEQ ID NO: 13025 - RNA, 20 nt, Artificial Sequence
  targeting sequence with GTCN PAM
guccuaggugauggcucccc

SEQ ID NO: 13026 - RNA, 20 nt, Artificial Sequence
  targeting sequence with GTCN PAM
cagccaacccgcuccacuac

SEQ ID NO: 13027 - RNA, 20 nt, Artificial Sequence
  targeting sequence with GTCN PAM
guguuccccuucccagccuc

SEQ ID NO: 13028 - RNA, 20 nt, Artificial Sequence
  targeting sequence with GTCN PAM
ggggagagggccaacaacug

SEQ ID NO: 13029 - RNA, 20 nt, Artificial Sequence
  targeting sequence with GTCN PAM
cuccuugagcaccagcccca

SEQ ID NO: 13030 - RNA, 20 nt, Artificial Sequence
  targeting sequence with GTCN PAM
gcuugcuuggguggggcugg

SEQ ID NO: 13031 - RNA, 20 nt, Artificial Sequence
  targeting sequence with GTCN PAM
guccucucuguugccuuuuu

SEQ ID NO: 13032 - RNA, 20 nt, Artificial Sequence
  targeting sequence with GTCN PAM
ucucuguugccuuuuuacag

SEQ ID NO: 13033 - RNA, 20 nt, Artificial Sequence
  targeting sequence with GTCN PAM
agaaaaguuggcuguaaaaa

SEQ ID NO: 13034 - RNA, 20 nt, Artificial Sequence
  targeting sequence with GTCN PAM
ccauauuaauaaaaaugcua

SEQ ID NO: 13035 - RNA, 20 nt, Artificial Sequence
  targeting sequence with GTCN PAM
uaacucuugcauagacuuga

SEQ ID NO: 13036 - RNA, 20 nt, Artificial Sequence
  targeting sequence with GTCN PAM
augcaagaguuaggacaacg

SEQ ID NO: 13037 - RNA, 20 nt, Artificial Sequence
  targeting sequence with GTCN PAM
agucuaugcaagaguuagga

SEQ ID NO: 13038 - RNA, 20 nt, Artificial Sequence
  targeting sequence with GTCN PAM
uccugcagcuccccugacca

SEQ ID NO: 13039 - RNA, 20 nt, Artificial Sequence
  targeting sequence with GTCN PAM
ggggagcugcaggaagacau

SEQ ID NO: 13040 - RNA, 20 nt, Artificial Sequence
  targeting sequence with GTCN PAM
ggguggucaggggagcugca

SEQ ID NO: 13041 - RNA, 20 nt, Artificial Sequence
  targeting sequence with GTCN PAM
aagugccuccuccuugguga

SEQ ID NO: 13042 - RNA, 20 nt, Artificial Sequence
  targeting sequence with GTCN PAM
ccaaggaggaggcacuuuga

SEQ ID NO: 13043 - RNA, 20 nt, Artificial Sequence
  targeting sequence with GTCN PAM
ugaccucccaaugcccuuuu

SEQ ID NO: 13044 - RNA, 20 nt, Artificial Sequence
  targeting sequence with GTCN PAM
ggacaacagagcaucuagag

SEQ ID NO: 13045 - RNA, 20 nt, Artificial Sequence
  targeting sequence with GTCN PAM
auggcuuuuuucaugauuua

SEQ ID NO: 13046 - RNA, 20 nt, Artificial Sequence
  targeting sequence with GTCN PAM
cagauugggugcaauggcuc

SEQ ID NO: 13047 - RNA, 20 nt, Artificial Sequence
  targeting sequence with GTCN PAM
ugaauuccuaaacacaagca

SEQ ID NO: 13048 - RNA, 20 nt, Artificial Sequence
  targeting sequence with GTCN PAM
cacuguugcccagggucuug

SEQ ID NO: 13049 - RNA, 20 nt, Artificial Sequence
  targeting sequence with GTCN PAM
cuauaaaaaaauuuaaaaga

SEQ ID NO: 13050 - RNA, 20 nt, Artificial Sequence
  targeting sequence with GTCN PAM
cggcuacucaggaggcugau

SEQ ID NO: 13051 - RNA, 20 nt, Artificial Sequence
  targeting sequence with GTCN PAM
cacauugaaugggaucauua

SEQ ID NO: 13052 - RNA, 20 nt, Artificial Sequence
  targeting sequence with GTCN PAM
uaagcaaguucucucucucu

SEQ ID NO: 13053 - RNA, 20 nt, Artificial Sequence
  targeting sequence with GTCN PAM
agagagagagagaacuugcu

SEQ ID NO: 13054 - RNA, 20 nt, Artificial Sequence
  targeting sequence with GTCN PAM
uaaggaaucucaggcaaaau

SEQ ID NO: 13055 - RNA, 20 nt, Artificial Sequence
  targeting sequence with GTCN PAM
gaaaauguaaucugggagga

SEQ ID NO: 13056 - RNA, 20 nt, Artificial Sequence
  targeting sequence with GTCN PAM
uauauggaaagcauucaaga

SEQ ID NO: 13057 - RNA, 20 nt, Artificial Sequence
  targeting sequence with GTCN PAM
acucuugaaugcuuuccaua

SEQ ID NO: 13058 - RNA, 20 nt, Artificial Sequence
  targeting sequence with GTCN PAM
aggguugcaccacaggccua

SEQ ID NO: 13059 - RNA, 20 nt, Artificial Sequence
  targeting sequence with GTCN PAM
ggguguggaucucuaaccag

SEQ ID NO: 13060 - RNA, 20 nt, Artificial Sequence
  targeting sequence with GTCN PAM
ccagggaucggggaggaagg

SEQ ID NO: 13061 - RNA, 20 nt, Artificial Sequence
  targeting sequence with GTCN PAM
agauuuucgccuuccugcaa

SEQ ID NO: 13062 - RNA, 20 nt, Artificial Sequence
  targeting sequence with GTCN PAM
ccuucccuauuugcuagucc

SEQ ID NO: 13063 - RNA, 20 nt, Artificial Sequence
  targeting sequence with GTCN PAM
cauuccuaguggccagcguu

SEQ ID NO: 13064 - RNA, 20 nt, Artificial Sequence
  targeting sequence with GTCN PAM
cagucucauuccuaguggcc

SEQ ID NO: 13065 - RNA, 20 nt, Artificial Sequence
  targeting sequence with GTCN PAM
cacugggcuucuugcuagau

SEQ ID NO: 13066 - RNA, 20 nt, Artificial Sequence
  targeting sequence with GTCN PAM
cuggucacacugggcuucuu

SEQ ID NO: 13067 - RNA, 20 nt, Artificial Sequence
  targeting sequence with GTCN PAM
ccagcauagaucgugucgcu

SEQ ID NO: 13068 - RNA, 20 nt, Artificial Sequence
  targeting sequence with GTCN PAM
ccauucaucuccaccaaagc

SEQ ID NO: 13069 - RNA, 20 nt, Artificial Sequence
  targeting sequence with GTCN PAM
gccccuccagagaaaagaac

SEQ ID NO: 13070 - RNA, 20 nt, Artificial Sequence
  targeting sequence with GTCN PAM
ucugagccuguugcuguucu

SEQ ID NO: 13071 - RNA, 20 nt, Artificial Sequence
  targeting sequence with GTCN PAM
ccuuuauuaguguaaaguac

SEQ ID NO: 13072 - RNA, 20 nt, Artificial Sequence
  targeting sequence with GTCN PAM
ugccgccauucuucauauau

SEQ ID NO: 13073 - RNA, 20 nt, Artificial Sequence
  targeting sequence with GTCN PAM
gcuuguuccaagcucagaag

SEQ ID NO: 13074 - RNA, 20 nt, Artificial Sequence
  targeting sequence with GTCN PAM
ugccccaccuucccugcuaa

SEQ ID NO: 13075 - RNA, 20 nt, Artificial Sequence
  targeting sequence with GTCN PAM
gaugauacggcacucuaguu

SEQ ID NO: 13076 - RNA, 20 nt, Artificial Sequence
  targeting sequence with GTCN PAM
guuuuaggaacuagagugcc

SEQ ID NO: 13077 - RNA, 20 nt, Artificial Sequence
  targeting sequence with GTCN PAM
gugaccgugugaggacucca

SEQ ID NO: 13078 - RNA, 20 nt, Artificial Sequence
  targeting sequence with GTCN PAM
cugacaacuacagucaguuu

SEQ ID NO: 13079 - RNA, 20 nt, Artificial Sequence
  targeting sequence with GTCN PAM
ucacacggucacugacaacu

SEQ ID NO: 13080 - RNA, 20 nt, Artificial Sequence
  targeting sequence with GTCN PAM
uggugagaugcccgcuggga

SEQ ID NO: 13081 - RNA, 20 nt, Artificial Sequence
  targeting sequence with GTCN PAM
gcaaacagagcaggaauugc

SEQ ID NO: 13082 - RNA, 20 nt, Artificial Sequence
  targeting sequence with GTCN PAM
uuuuuacugccaauuuuuug

SEQ ID NO: 13083 - RNA, 20 nt, Artificial Sequence
  targeting sequence with GTCN PAM
uaacugucacuguuguacua

SEQ ID NO: 13084 - RNA, 20 nt, Artificial Sequence
  targeting sequence with GTCN PAM
cuguuguacuacauuaaaaa

SEQ ID NO: 13085 - RNA, 20 nt, Artificial Sequence
  targeting sequence with GTCN PAM
ucagcagguucauugacugu

SEQ ID NO: 13086 - RNA, 20 nt, Artificial Sequence
  targeting sequence with GTCN PAM
augaaccugcugaugacuuu

SEQ ID NO: 13087 - RNA, 20 nt, Artificial Sequence
  targeting sequence with GTCN PAM
gcaaucaagugguuaccagc

SEQ ID NO: 13088 - RNA, 20 nt, Artificial Sequence
  targeting sequence with GTCN PAM
uugcagcaacaauauaagca

SEQ ID NO: 13089 - RNA, 20 nt, Artificial Sequence
  targeting sequence with GTCN PAM
accguguauauuauacgcuu

SEQ ID NO: 13090 - RNA, 20 nt, Artificial Sequence
  targeting sequence with GTCN PAM
ucacuguaaagcuucaucag

SEQ ID NO: 13091 - RNA, 20 nt, Artificial Sequence
  targeting sequence with GTCN PAM
ccuuauuuccuauggaaaca

SEQ ID NO: 13092 - RNA, 20 nt, Artificial Sequence
  targeting sequence with GTCN PAM
ccagcgaugauaucccagug

SEQ ID NO: 13093 - RNA, 20 nt, Artificial Sequence
  targeting sequence with GTCN PAM
ugucccacacaaucucuugg

SEQ ID NO: 13094 - RNA, 20 nt, Artificial Sequence
  targeting sequence with GTCN PAM
cacacaaucucuuggugagg

SEQ ID NO: 13095 - RNA, 20 nt, Artificial Sequence
  targeting sequence with GTCN PAM
uacuguuuccccuacccuau

SEQ ID NO: 13096 - RNA, 20 nt, Artificial Sequence
  targeting sequence with GTCN PAM
ugcaguuugaaaugugaugu

SEQ ID NO: 13097 - RNA, 20 nt, Artificial Sequence
  targeting sequence with GTCN PAM
gaaguuugccacucgccucu

SEQ ID NO: 13098 - RNA, 20 nt, Artificial Sequence
  targeting sequence with GTCN PAM
guuucucuaaggguacaguu

SEQ ID NO: 13099 - RNA, 20 nt, Artificial Sequence
  targeting sequence with GTCN PAM
aacacacugagaagauggaa

SEQ ID NO: 13100 - RNA, 20 nt, Artificial Sequence
  targeting sequence with GTCN PAM
cagaauaacaaugaagucug

SEQ ID NO: 13101 - RNA, 20 nt, Artificial Sequence
  targeting sequence with GTCN PAM
gacagcacagaaacccucac

SEQ ID NO: 13102 - RNA, 20 nt, Artificial Sequence
  targeting sequence with GTCN PAM
gacuucauuguuauucugug

SEQ ID NO: 13103 - RNA, 20 nt, Artificial Sequence
  targeting sequence with GTCN PAM
uuucauucucuggcagugag

SEQ ID NO: 13104 - RNA, 20 nt, Artificial Sequence
  targeting sequence with GTCN PAM
ggcugcuguggcauugugug

SEQ ID NO: 13105 - RNA, 20 nt, Artificial Sequence
  targeting sequence with GTCN PAM
cagaggcgcagccagcccug

SEQ ID NO: 13106 - RNA, 20 nt, Artificial Sequence
  targeting sequence with GTCN PAM
gauuugccaagucacagagg

SEQ ID NO: 13107 - RNA, 20 nt, Artificial Sequence
  targeting sequence with GTCN PAM
ugccuuauuuucaucucacc

SEQ ID NO: 13108 - RNA, 20 nt, Artificial Sequence
  targeting sequence with GTCN PAM
uauuuccaaaguauagcacc

SEQ ID NO: 13109 - RNA, 20 nt, Artificial Sequence
  targeting sequence with GTCN PAM
agguuuaagauuuauuuucc

SEQ ID NO: 13110 - RNA, 20 nt, Artificial Sequence
  targeting sequence with GTCN PAM
gucaagguuuaagauuuauu

SEQ ID NO: 13111 - RNA, 20 nt, Artificial Sequence
  targeting sequence with GTCN PAM
uguugaggagaaacaaauuc

SEQ ID NO: 13112 - RNA, 20 nt, Artificial Sequence
  targeting sequence with GTCN PAM
uaaaucaugugaucugcaau

SEQ ID NO: 13113 - RNA, 20 nt, Artificial Sequence
  targeting sequence with GTCN PAM
ccaagcauuaaaaagauaau

SEQ ID NO: 13114 - RNA, 20 nt, Artificial Sequence
  targeting sequence with GTCN PAM
aauaaugcacccuguacuuc

SEQ ID NO: 13115 - RNA, 20 nt, Artificial Sequence
  targeting sequence with GTCN PAM
agaugagaacccuaugcaua

SEQ ID NO: 13116 - RNA, 20 nt, Artificial Sequence
  targeting sequence with GTCN PAM
cccuauuuguauagaauuuc

SEQ ID NO: 13117 - RNA, 20 nt, Artificial Sequence
  targeting sequence with GTCN PAM
guguaaauugacuuaauuac

SEQ ID NO: 13118 - RNA, 20 nt, Artificial Sequence
  targeting sequence with GTCN PAM
auuuacacagaccuuuguau

SEQ ID NO: 13119 - RNA, 20 nt, Artificial Sequence
  targeting sequence with GTCN PAM
gccacuggcucuauuuccga

SEQ ID NO: 13120 - RNA, 20 nt, Artificial Sequence
  targeting sequence with GTCN PAM
auauguggauucacauuucu

SEQ ID NO: 13121 - RNA, 20 nt, Artificial Sequence
  targeting sequence with GTCN PAM
cgggagcguggucuauaugu

SEQ ID NO: 13122 - RNA, 20 nt, Artificial Sequence
  targeting sequence with GTCN PAM
cagcagcuuucccaguccaa

SEQ ID NO: 13123 - RNA, 20 nt, Artificial Sequence
  targeting sequence with GTCN PAM
aaucuccaggcucuuccaaa

SEQ ID NO: 13124 - RNA, 20 nt, Artificial Sequence
  targeting sequence with GTCN PAM
ugacuccucucaggcugggc

SEQ ID NO: 13125 - RNA, 20 nt, Artificial Sequence
  targeting sequence with GTCN PAM
agacacaauacuggaugcuc

SEQ ID NO: 13126 - RNA, 20 nt, Artificial Sequence
  targeting sequence with GTCN PAM
cuucucaacucaccaaucau

SEQ ID NO: 13127 - RNA, 20 nt, Artificial Sequence
  targeting sequence with GTCN PAM
gcauagaaaaccuuuucucu

SEQ ID NO: 13128 - RNA, 20 nt, Artificial Sequence
  targeting sequence with GTCN PAM
ucaucuggcaacuuaaugca

SEQ ID NO: 13129 - RNA, 20 nt, Artificial Sequence
  targeting sequence with GTCN PAM
aauauuagauguaauaguua

SEQ ID NO: 13130 - RNA, 20 nt, Artificial Sequence
  targeting sequence with GTCN PAM
gugaaacaacccagcgacuu

SEQ ID NO: 13131 - RNA, 20 nt, Artificial Sequence
  targeting sequence with GTCN PAM
cuggguuguuucacugacua

SEQ ID NO: 13132 - RNA, 20 nt, Artificial Sequence
  targeting sequence with GTCN PAM
aaagucacaaugcuacucug

SEQ ID NO: 13133 - RNA, 20 nt, Artificial Sequence
  targeting sequence with GTCN PAM
caaugcuacucugcacccau

SEQ ID NO: 13134 - RNA, 20 nt, Artificial Sequence
  targeting sequence with GTCN PAM
cuccugggucugaaggcuac

SEQ ID NO: 13135 - RNA, 20 nt, Artificial Sequence
  targeting sequence with GTCN PAM
gaaggcuaccucuguuacca

SEQ ID NO: 13136 - RNA, 20 nt, Artificial Sequence
  targeting sequence with GTCN PAM
uugcuccuccccaccccagc

SEQ ID NO: 13137 - RNA, 20 nt, Artificial Sequence
  targeting sequence with GTCN PAM
cucuaaagugacaaccuaag

SEQ ID NO: 13138 - RNA, 20 nt, Artificial Sequence
  targeting sequence with GTCN PAM
cuuuagagagacuguccuug

SEQ ID NO: 13139 - RNA, 20 nt, Artificial Sequence
  targeting sequence with GTCN PAM
cuuaugccuguaaucccagc

SEQ ID NO: 13140 - RNA, 20 nt, Artificial Sequence
  targeting sequence with GTCN PAM
cccaggcuggagugcagugg

SEQ ID NO: 13141 - RNA, 20 nt, Artificial Sequence
  targeting sequence with GTCN PAM
ugcuugaucuagcaccugcg

SEQ ID NO: 13142 - RNA, 20 nt, Artificial Sequence
  targeting sequence with GTCN PAM
ucagccccucucugccuaca

SEQ ID NO: 13143 - RNA, 20 nt, Artificial Sequence
  targeting sequence with GTCN PAM
cucuccuccaccugucauca

SEQ ID NO: 13144 - RNA, 20 nt, Artificial Sequence
  targeting sequence with GTCN PAM
gggaugacaugggggugcug

SEQ ID NO: 13145 - RNA, 20 nt, Artificial Sequence
  targeting sequence with GTCN PAM
ucccggacagcucccuuuga

SEQ ID NO: 13146 - RNA, 20 nt, Artificial Sequence
  targeting sequence with GTCN PAM
guguuccuuaucucacacac

SEQ ID NO: 13147 - RNA, 20 nt, Artificial Sequence
  targeting sequence with GTCN PAM
gaggucuuuaagguaugcca

SEQ ID NO: 13148 - RNA, 20 nt, Artificial Sequence
  targeting sequence with GTCN PAM
uuaagguaugccaaguggag

SEQ ID NO: 13149 - RNA, 20 nt, Artificial Sequence
  targeting sequence with GTCN PAM
agaacaagagagcuggaugu

SEQ ID NO: 13150 - RNA, 20 nt, Artificial Sequence
  targeting sequence with GTCN PAM
cuaaccuguauccuccugcc

SEQ ID NO: 13151 - RNA, 20 nt, Artificial Sequence
  targeting sequence with GTCN PAM
agaagaggcaguacuaggaa

SEQ ID NO: 13152 - RNA, 20 nt, Artificial Sequence
  targeting sequence with GTCN PAM
ccuuccuaguacugccucuu

SEQ ID NO: 13153 - RNA, 20 nt, Artificial Sequence
  targeting sequence with GTCN PAM
ggaaagcccuggaauagugu

SEQ ID NO: 13154 - RNA, 20 nt, Artificial Sequence
  targeting sequence with GTCN PAM
gcuaagaugaggccugaaag

SEQ ID NO: 13155 - RNA, 20 nt, Artificial Sequence
  targeting sequence with GTCN PAM
ccccaacugcugaguuggag

SEQ ID NO: 13156 - RNA, 20 nt, Artificial Sequence
  targeting sequence with GTCN PAM
aaguuuggcugcaaagaaga

SEQ ID NO: 13157 - RNA, 20 nt, Artificial Sequence
  targeting sequence with GTCN PAM
aagccucucuucucccuguu

SEQ ID NO: 13158 - RNA, 20 nt, Artificial Sequence
  targeting sequence with GTCN PAM
aagccucucuucugcccugu

SEQ ID NO: 13159 - RNA, 20 nt, Artificial Sequence
  targeting sequence with GTCN PAM
cagcacacugguuucucuuc

SEQ ID NO: 13160 - RNA, 20 nt, Artificial Sequence
  targeting sequence with GTCN PAM
cugggaagggucuggcaggg

SEQ ID NO: 13161 - RNA, 20 nt, Artificial Sequence
  targeting sequence with GTCN PAM
ggcaggguggagcguucugg

SEQ ID NO: 13162 - RNA, 20 nt, Artificial Sequence
  targeting sequence with GTCN PAM
acccaaagccccuagcgcuc

SEQ ID NO: 13163 - RNA, 20 nt, Artificial Sequence
  targeting sequence with GTCN PAM
caggagaggagacaagaaca

SEQ ID NO: 13164 - RNA, 20 nt, Artificial Sequence
  targeting sequence with GTCN PAM
ccucuccugugacaguggga

SEQ ID NO: 13165 - RNA, 20 nt, Artificial Sequence
  targeting sequence with GTCN PAM
caggagagcuccugcggcca

SEQ ID NO: 13166 - RNA, 20 nt, Artificial Sequence
  targeting sequence with GTCN PAM
cuccacacauuaccucauca

SEQ ID NO: 13167 - RNA, 20 nt, Artificial Sequence
  targeting sequence with GTCN PAM
caucacugugcugggcugca

SEQ ID NO: 13168 - RNA, 20 nt, Artificial Sequence
  targeting sequence with GTCN PAM
cccugauuuuacagaaaggu

SEQ ID NO: 13169 - RNA, 20 nt, Artificial Sequence
  targeting sequence with GTCN PAM
uuuuuuuuuaaguguuaucu

SEQ ID NO: 13170 - RNA, 20 nt, Artificial Sequence
  targeting sequence with GTCN PAM
cuucacaguacuugguacag

SEQ ID NO: 13171 - RNA, 20 nt, Artificial Sequence
  targeting sequence with GTCN PAM
ccucuguggucccuucacag

SEQ ID NO: 13172 - RNA, 20 nt, Artificial Sequence
  targeting sequence with GTCN PAM
guaacuuuccuuaacagcag

SEQ ID NO: 13173 - RNA, 20 nt, Artificial Sequence
  targeting sequence with GTCN PAM
uuccaauagucuguaacuuu

SEQ ID NO: 13174 - RNA, 20 nt, Artificial Sequence
  targeting sequence with GTCN PAM
guuaaucauuacgucuuucc

SEQ ID NO: 13175 - RNA, 20 nt, Artificial Sequence
  targeting sequence with GTCN PAM
aaauuuucuuggacuccccu

SEQ ID NO: 13176 - RNA, 20 nt, Artificial Sequence
  targeting sequence with GTCN PAM
aagaaaauuuugacauguau

SEQ ID NO: 13177 - RNA, 20 nt, Artificial Sequence
  targeting sequence with GTCN PAM
acauuuccaggaaggcuggu

SEQ ID NO: 13178 - RNA, 20 nt, Artificial Sequence
  targeting sequence with GTCN PAM
cucguuugcucucaccagcc

SEQ ID NO: 13179 - RNA, 20 nt, Artificial Sequence
  targeting sequence with GTCN PAM
cgaugaagccagggcacagg

SEQ ID NO: 13180 - RNA, 20 nt, Artificial Sequence
  targeting sequence with GTCN PAM
aaagaguuaccagcgcugcc

SEQ ID NO: 13181 - RNA, 20 nt, Artificial Sequence
  targeting sequence with GTCN PAM
uugugugcaaagggcagccu

SEQ ID NO: 13182 - RNA, 20 nt, Artificial Sequence
  targeting sequence with GTCN PAM
gcauguccuugugugcaaag

SEQ ID NO: 13183 - RNA, 20 nt, Artificial Sequence
  targeting sequence with GTCN PAM
ccguucucauuggcaggacu

SEQ ID NO: 13184 - RNA, 20 nt, Artificial Sequence
  targeting sequence with GTCN PAM
ugccaaugagaacggagaca

SEQ ID NO: 13185 - RNA, 20 nt, Artificial Sequence
  targeting sequence with GTCN PAM
gagaguaguccugccaauga

SEQ ID NO: 13186 - RNA, 20 nt, Artificial Sequence
  targeting sequence with GTCN PAM
ugcagaagauucaaacacaa

SEQ ID NO: 13187 - RNA, 20 nt, Artificial Sequence
  targeting sequence with GTCN PAM
uguguuugaaucuucugcag

SEQ ID NO: 13188 - RNA, 20 nt, Artificial Sequence
  targeting sequence with GTCN PAM
ucuuguguuugaaucuucug

SEQ ID NO: 13189 - RNA, 20 nt, Artificial Sequence
  targeting sequence with GTCN PAM
ucccuggcgguugcugcugc

SEQ ID NO: 13190 - RNA, 20 nt, Artificial Sequence
  targeting sequence with GTCN PAM
gaugaaagguagucuucccu

SEQ ID NO: 13191 - RNA, 20 nt, Artificial Sequence
  targeting sequence with GTCN PAM
cacugaaggucagaugaaag

SEQ ID NO: 13192 - RNA, 20 nt, Artificial Sequence
  targeting sequence with GTCN PAM
ccagaacccccucaaccccu

SEQ ID NO: 13193 - RNA, 20 nt, Artificial Sequence
  targeting sequence with GTCN PAM
cuuuuugugaccagacugcc

SEQ ID NO: 13194 - RNA, 20 nt, Artificial Sequence
  targeting sequence with GTCN PAM
caaaaagggacagggguuga

SEQ ID NO: 13195 - RNA, 20 nt, Artificial Sequence
  targeting sequence with GTCN PAM
ggucacaaaaagggacaggg

SEQ ID NO: 13196 - RNA, 20 nt, Artificial Sequence
  targeting sequence with GTCN PAM
uacagguugggcagucuggu

SEQ ID NO: 13197 - RNA, 20 nt, Artificial Sequence
  targeting sequence with GTCN PAM
agaaggaaagucauacaggu

SEQ ID NO: 13198 - RNA, 20 nt, Artificial Sequence
  targeting sequence with GTCN PAM
aaaucacuuauggaggauuu

SEQ ID NO: 13199 - RNA, 20 nt, Artificial Sequence
  targeting sequence with GTCN PAM
cuuguuuuugcguggucuaa

SEQ ID NO: 13200 - RNA, 20 nt, Artificial Sequence
  targeting sequence with GTCN PAM
cuaaugaaacaucaacugga

SEQ ID NO: 13201 - RNA, 20 nt, Artificial Sequence
  targeting sequence with GTCN PAM
aguaauguucugacaucuga

SEQ ID NO: 13202 - RNA, 20 nt, Artificial Sequence
  targeting sequence with GTCN PAM
gaacauuacuggacaccaca

SEQ ID NO: 13203 - RNA, 20 nt, Artificial Sequence
  targeting sequence with GTCN PAM
aaaaugccaucagaggugac

SEQ ID NO: 13204 - RNA, 20 nt, Artificial Sequence
  targeting sequence with GTCN PAM
ccucugauggcauuuuugac

SEQ ID NO: 13205 - RNA, 20 nt, Artificial Sequence
  targeting sequence with GTCN PAM
uaaaagcaucccaaguaggg

SEQ ID NO: 13206 - RNA, 20 nt, Artificial Sequence
  targeting sequence with GTCN PAM
acccagaccuuccaucacau

SEQ ID NO: 13207 - RNA, 20 nt, Artificial Sequence
  targeting sequence with GTCN PAM
ggguagacuuguacccuacu

SEQ ID NO: 13208 - RNA, 20 nt, Artificial Sequence
  targeting sequence with GTCN PAM
ugaaucgcuuuaugugaugg

SEQ ID NO: 13209 - RNA, 20 nt, Artificial Sequence
  targeting sequence with GTCN PAM
aguauugcuucuuauaucau

SEQ ID NO: 13210 - RNA, 20 nt, Artificial Sequence
  targeting sequence with GTCN PAM
uaacuucauaggggaaaagg

SEQ ID NO: 13211 - RNA, 20 nt, Artificial Sequence
  targeting sequence with GTCN PAM
uaauacauaugucuuaacuu

SEQ ID NO: 13212 - RNA, 20 nt, Artificial Sequence
  targeting sequence with GTCN PAM
gucuccauauucaguucuag

SEQ ID NO: 13213 - RNA, 20 nt, Artificial Sequence
  targeting sequence with GTCN PAM
ccauauucaguucuagagau

SEQ ID NO: 13214 - RNA, 20 nt, Artificial Sequence
  targeting sequence with GTCN PAM
ggaaaaaucucuagaacuga

SEQ ID NO: 13215 - RNA, 20 nt, Artificial Sequence
  targeting sequence with GTCN PAM
ugcagcuaaggaguacuuca

SEQ ID NO: 13216 - RNA, 20 nt, Artificial Sequence
  targeting sequence with GTCN PAM
ucagguguccugcagcuaag

SEQ ID NO: 13217 - RNA, 20 nt, Artificial Sequence
  targeting sequence with GTCN PAM
uuauauuugugauucuacuu

SEQ ID NO: 13218 - RNA, 20 nt, Artificial Sequence
  targeting sequence with GTCN PAM
aauucauggagacagaaauu

SEQ ID NO: 13219 - RNA, 20 nt, Artificial Sequence
  targeting sequence with GTCN PAM
ccaugaauuugacuacucua

SEQ ID NO: 13220 - RNA, 20 nt, Artificial Sequence
  targeting sequence with GTCN PAM
gucuucaauagguccagagu

SEQ ID NO: 13221 - RNA, 20 nt, Artificial Sequence
  targeting sequence with GTCN PAM
ucaauagguccagaguuuca

SEQ ID NO: 13222 - RNA, 20 nt, Artificial Sequence
  targeting sequence with GTCN PAM
agaguuucaguuucagaaga

SEQ ID NO: 13223 - RNA, 20 nt, Artificial Sequence
  targeting sequence with GTCN PAM
cugaacuauacacuuaaaaa

SEQ ID NO: 13224 - RNA, 20 nt, Artificial Sequence
  targeting sequence with GTCN PAM
aucagccuguguucaaguuu

SEQ ID NO: 13225 - RNA, 20 nt, Artificial Sequence
  targeting sequence with GTCN PAM
uagagugaaaacuugaacac

SEQ ID NO: 13226 - RNA, 20 nt, Artificial Sequence
  targeting sequence with GTCN PAM
cuuaaacuacccaugauaua

SEQ ID NO: 13227 - RNA, 20 nt, Artificial Sequence
  targeting sequence with GTCN PAM
uauaucauggguaguuuaag

SEQ ID NO: 13228 - RNA, 20 nt, Artificial Sequence
  targeting sequence with GTCN PAM
agaaccuugccuguauuauc

SEQ ID NO: 13229 - RNA, 20 nt, Artificial Sequence
  targeting sequence with GTCN PAM
ccuguagcuccugagcacuu

SEQ ID NO: 13230 - RNA, 20 nt, Artificial Sequence
  targeting sequence with GTCN PAM
cuaaccucagaauagccuuu

SEQ ID NO: 13231 - RNA, 20 nt, Artificial Sequence
  targeting sequence with GTCN PAM
gaaaggcaggaaucagggca

SEQ ID NO: 13232 - RNA, 20 nt, Artificial Sequence
  targeting sequence with GTCN PAM
cucuuuuaauacuuccccuc

SEQ ID NO: 13233 - RNA, 20 nt, Artificial Sequence
  targeting sequence with GTCN PAM
gggccugcuugcuuggaagg

SEQ ID NO: 13234 - RNA, 20 nt, Artificial Sequence
  targeting sequence with GTCN PAM
gauucuccagguaucaaaac

SEQ ID NO: 13235 - RNA, 20 nt, Artificial Sequence
  targeting sequence with GTCN PAM
cauaugagcagaaggggaac

SEQ ID NO: 13236 - RNA, 20 nt, Artificial Sequence
  targeting sequence with GTCN PAM
cucuugcucaaaaguaagua

SEQ ID NO: 13237 - RNA, 20 nt, Artificial Sequence
  targeting sequence with GTCN PAM
aauuucuugucacucuugcu

SEQ ID NO: 13238 - RNA, 20 nt, Artificial Sequence
  targeting sequence with GTCN PAM
cugcuaccagugugucaaau

SEQ ID NO: 13239 - RNA, 20 nt, Artificial Sequence
  targeting sequence with GTCN PAM
acaugauuacuguggugcau

SEQ ID NO: 13240 - RNA, 20 nt, Artificial Sequence
  targeting sequence with GTCN PAM
uuuucucuucccucagcuuu

SEQ ID NO: 13241 - RNA, 20 nt, Artificial Sequence
  targeting sequence with GTCN PAM
uuuauuguuaaaauguccuu

SEQ ID NO: 13242 - RNA, 20 nt, Artificial Sequence
  targeting sequence with GTCN PAM
cuuggagccauuuucaguug

SEQ ID NO: 13243 - RNA, 20 nt, Artificial Sequence
  targeting sequence with GTCN PAM
auuuuuagaacaagagagcu

SEQ ID NO: 13244 - RNA, 20 nt, Artificial Sequence
  targeting sequence with GTCN PAM
ggcaccaccaugcuuuuagu

SEQ ID NO: 13245 - RNA, 20 nt, Artificial Sequence
  targeting sequence with GTCN PAM
aacuugcagcaccauguaug

SEQ ID NO: 13246 - RNA, 20 nt, Artificial Sequence
  targeting sequence with GTCN PAM
cuaggugaauaaucaggcag

SEQ ID NO: 13247 - RNA, 20 nt, Artificial Sequence
  targeting sequence with GTCN PAM
guucagcaauuaucaccugc

SEQ ID NO: 13248 - RNA, 20 nt, Artificial Sequence
  targeting sequence with GTCN PAM
ggaguuugagaccagccuga

SEQ ID NO: 13249 - RNA, 20 nt, Artificial Sequence
  targeting sequence with GTCN PAM
caaacuccugaccucaagug

SEQ ID NO: 13250 - RNA, 20 nt, Artificial Sequence
  targeting sequence with GTCN PAM
gucucuacaaaaaaauacaa

SEQ ID NO: 13251 - RNA, 20 nt, Artificial Sequence
  targeting sequence with GTCN PAM
cuacaaaaaaauacaaaaau

SEQ ID NO: 13252 - RNA, 20 nt, Artificial Sequence
  targeting sequence with GTCN PAM
agagugcaguggcaugaucu

SEQ ID NO: 13253 - RNA, 20 nt, Artificial Sequence
  targeting sequence with GTCN PAM
uccagucuagagugcagugg

SEQ ID NO: 13254 - RNA, 20 nt, Artificial Sequence
  targeting sequence with GTCN PAM
cacuuugucuuccagucuag

SEQ ID NO: 13255 - RNA, 20 nt, Artificial Sequence
  targeting sequence with GTCN PAM
caaaaauaaauaaauaaaua

SEQ ID NO: 13256 - RNA, 20 nt, Artificial Sequence
  targeting sequence with GTCN PAM
ugcucuugaggaguuuauag

SEQ ID NO: 13257 - RNA, 20 nt, Artificial Sequence
  targeting sequence with GTCN PAM
ggaacuuaaaaacuauaaac

SEQ ID NO: 13258 - RNA, 20 nt, Artificial Sequence
  targeting sequence with GTCN PAM
gagccacacacaggccgucu

SEQ ID NO: 13259 - RNA, 20 nt, Artificial Sequence
  targeting sequence with GTCN PAM
acucuuaaguuguuugggca

SEQ ID NO: 13260 - RNA, 20 nt, Artificial Sequence
  targeting sequence with GTCN PAM
uuuuaccuauaguaagcgua

SEQ ID NO: 13261 - RNA, 20 nt, Artificial Sequence
  targeting sequence with GTCN PAM
ggcucaugaaaugugaaugu

SEQ ID NO: 13262 - RNA, 20 nt, Artificial Sequence
  targeting sequence with GTCN PAM
cagguuuugguuuuucucuc

SEQ ID NO: 13263 - RNA, 20 nt, Artificial Sequence
  targeting sequence with GTCN PAM
ggaagguguagcuugggauu

SEQ ID NO: 13264 - RNA, 20 nt, Artificial Sequence
  targeting sequence with GTCN PAM
gaaaaauuaaaacccaggga

SEQ ID NO: 13265 - RNA, 20 nt, Artificial Sequence
  targeting sequence with GTCN PAM
gggccacugggcucccucau

SEQ ID NO: 13266 - RNA, 20 nt, Artificial Sequence
  targeting sequence with GTCN PAM
ggucagggccacugggcucc

SEQ ID NO: 13267 - RNA, 20 nt, Artificial Sequence
  targeting sequence with GTCN PAM
cuguagaucccaccgagagu

SEQ ID NO: 13268 - RNA, 20 nt, Artificial Sequence
  targeting sequence with GTCN PAM
auaguaaauauguggauaau

SEQ ID NO: 13269 - RNA, 20 nt, Artificial Sequence
  targeting sequence with GTCN PAM
uaugcacaaaugucuauagu

SEQ ID NO: 13270 - RNA, 20 nt, Artificial Sequence
  targeting sequence with GTCN PAM
caaacacaaauuugacucgc

SEQ ID NO: 13271 - RNA, 20 nt, Artificial Sequence
  targeting sequence with GTCN PAM
aauuuguguuugagacagaa

SEQ ID NO: 13272 - RNA, 20 nt, Artificial Sequence
  targeting sequence with GTCN PAM
uagccacgggugcuuucuuu

SEQ ID NO: 13273 - RNA, 20 nt, Artificial Sequence
  targeting sequence with GTCN PAM
aacacuaaauuaaucucuug

SEQ ID NO: 13274 - RNA, 20 nt, Artificial Sequence
  targeting sequence with GTCN PAM
uguauugguggugguggugu

SEQ ID NO: 13275 - RNA, 20 nt, Artificial Sequence
  targeting sequence with GTCN PAM
cugugcccaacuaauuucuu

SEQ ID NO: 13276 - RNA, 20 nt, Artificial Sequence
  targeting sequence with GTCN PAM
cagcuauacaggaggcugag

SEQ ID NO: 13277 - RNA, 20 nt, Artificial Sequence
  targeting sequence with GTCN PAM
uaggcacaaaugauccuuuu

SEQ ID NO: 13278 - RNA, 20 nt, Artificial Sequence
  targeting sequence with GTCN PAM
uagcucacuguagccucaaa

SEQ ID NO: 13279 - RNA, 20 nt, Artificial Sequence
  targeting sequence with GTCN PAM
cccucuguugcccaggcugg

SEQ ID NO: 13280 - RNA, 20 nt, Artificial Sequence
  targeting sequence with GTCN PAM
ugaaaaaaagaaaacaaaac

SEQ ID NO: 13281 - RNA, 20 nt, Artificial Sequence
  targeting sequence with GTCN PAM
auucauuuccuaucuaugug

SEQ ID NO: 13282 - RNA, 20 nt, Artificial Sequence
  targeting sequence with GTCN PAM
ucauaacccacagagaacua

SEQ ID NO: 13283 - RNA, 20 nt, Artificial Sequence
  targeting sequence with GTCN PAM
uaucccuaaggagcaauaau

SEQ ID NO: 13284 - RNA, 20 nt, Artificial Sequence
  targeting sequence with GTCN PAM
guaaaagcacuaggaccaaa

SEQ ID NO: 13285 - RNA, 20 nt, Artificial Sequence
  targeting sequence with GTCN PAM
uagugcuuuuacagacuuug

SEQ ID NO: 13286 - RNA, 20 nt, Artificial Sequence
  targeting sequence with GTCN PAM
uuucuuacucaaaacucuuu

SEQ ID NO: 13287 - RNA, 20 nt, Artificial Sequence
  targeting sequence with GTCN PAM
ccaaauuccaaugauucucu

SEQ ID NO: 13288 - RNA, 20 nt, Artificial Sequence
  targeting sequence with GTCN PAM
gucccuugccccaccacagg

SEQ ID NO: 13289 - RNA, 20 nt, Artificial Sequence
  targeting sequence with GTCN PAM
cuugccccaccacaggccuu

SEQ ID NO: 13290 - RNA, 20 nt, Artificial Sequence
  targeting sequence with GTCN PAM
gggaauauucugagugugaa

SEQ ID NO: 13291 - RNA, 20 nt, Artificial Sequence
  targeting sequence with GTCN PAM
ucuaguucccaaucuugcau

SEQ ID NO: 13292 - RNA, 20 nt, Artificial Sequence
  targeting sequence with GTCN PAM
auagugucuaagauuugaua

SEQ ID NO: 13293 - RNA, 20 nt, Artificial Sequence
  targeting sequence with GTCN PAM
aagauuugauaaacuauaaa

SEQ ID NO: 13294 - RNA, 20 nt, Artificial Sequence
  targeting sequence with GTCN PAM
cccucagagguacauuucug

SEQ ID NO: 13295 - RNA, 20 nt, Artificial Sequence
  targeting sequence with GTCN PAM
ccugcacuacaguuguuugu

SEQ ID NO: 13296 - RNA, 20 nt, Artificial Sequence
  targeting sequence with GTCN PAM
ugcucccucacucaacugug

SEQ ID NO: 13297 - RNA, 20 nt, Artificial Sequence
  targeting sequence with GTCN PAM
aaugcauuugguuuagaggc

SEQ ID NO: 13298 - RNA, 20 nt, Artificial Sequence
  targeting sequence with GTCN PAM
ugugucuaaugcauuugguu

SEQ ID NO: 13299 - RNA, 20 nt, Artificial Sequence
  targeting sequence with GTCN PAM
gucaugugucuaaugcauuu

SEQ ID NO: 13300 - RNA, 20 nt, Artificial Sequence
  targeting sequence with GTCN PAM
caauaaaugcagaccaaaug

SEQ ID NO: 13301 - RNA, 20 nt, Artificial Sequence
  targeting sequence with GTCN PAM
gcauuuauugagaccaaauc

SEQ ID NO: 13302 - RNA, 20 nt, Artificial Sequence
  targeting sequence with GTCN PAM
uuuuauuauuucuccauuca

SEQ ID NO: 13303 - RNA, 20 nt, Artificial Sequence
  targeting sequence with GTCN PAM
acaaguguuuauaaauaaaa

SEQ ID NO: 13304 - RNA, 20 nt, Artificial Sequence
  targeting sequence with GTCN PAM
gaacaguuaugacuuaccaa

SEQ ID NO: 13305 - RNA, 20 nt, Artificial Sequence
  targeting sequence with GTCN PAM
uaacuguucugacucacuuu

SEQ ID NO: 13306 - RNA, 20 nt, Artificial Sequence
  targeting sequence with GTCN PAM
gccagaaggugauagagcua

SEQ ID NO: 13307 - RNA, 20 nt, Artificial Sequence
  targeting sequence with GTCN PAM
agggucggccagaaggugau

SEQ ID NO: 13308 - RNA, 20 nt, Artificial Sequence
  targeting sequence with GTCN PAM
auacugcuuucuaggccuua

SEQ ID NO: 13309 - RNA, 20 nt, Artificial Sequence
  targeting sequence with GTCN PAM
gggaacugaaauaaacaacc

SEQ ID NO: 13310 - RNA, 20 nt, Artificial Sequence
  targeting sequence with GTCN PAM
cuaaacagauccgauuuuau

SEQ ID NO: 13311 - RNA, 20 nt, Artificial Sequence
  targeting sequence with GTCN PAM
auauccuaguuuguuuucca

SEQ ID NO: 13312 - RNA, 20 nt, Artificial Sequence
  targeting sequence with GTCN PAM
gcuuauaaaauagaaaaaug

SEQ ID NO: 13313 - RNA, 20 nt, Artificial Sequence
  targeting sequence with GTCN PAM
uuucccacuuuuauacauau

SEQ ID NO: 13314 - RNA, 20 nt, Artificial Sequence
  targeting sequence with GTCN PAM
gucauagaggaagaaacugc

SEQ ID NO: 13315 - RNA, 20 nt, Artificial Sequence
  targeting sequence with GTCN PAM
uagaggaagaaacugcccaa

SEQ ID NO: 13316 - RNA, 20 nt, Artificial Sequence
  targeting sequence with GTCN PAM
uauaauuaguaaauagcaaa

SEQ ID NO: 13317 - RNA, 20 nt, Artificial Sequence
  targeting sequence with GTCN PAM
guagagaaaaggcugagggc

SEQ ID NO: 13318 - RNA, 20 nt, Artificial Sequence
  targeting sequence with GTCN PAM
uuaggcucuuauuauaauau

SEQ ID NO: 13319 - RNA, 20 nt, Artificial Sequence
  targeting sequence with GTCN PAM
cugggguagcgugagcaagg

SEQ ID NO: 13320 - RNA, 20 nt, Artificial Sequence
  targeting sequence with GTCN PAM
uccuugcucacgcuacccca

SEQ ID NO: 13321 - RNA, 20 nt, Artificial Sequence
  targeting sequence with GTCN PAM
ucaccagucauccuugcuca

SEQ ID NO: 13322 - RNA, 20 nt, Artificial Sequence
  targeting sequence with GTCN PAM
acuguggucaucaccaguca

SEQ ID NO: 13323 - RNA, 20 nt, Artificial Sequence
  targeting sequence with GTCN PAM
cauuucuuauuuauuuauuu

SEQ ID NO: 13324 - RNA, 20 nt, Artificial Sequence
  targeting sequence with GTCN PAM
cacuuaaaggcuaucuggcu

SEQ ID NO: 13325 - RNA, 20 nt, Artificial Sequence
  targeting sequence with GTCN PAM
uaccuuaaugaaaugcagca

SEQ ID NO: 13326 - RNA, 20 nt, Artificial Sequence
  targeting sequence with GTCN PAM
gcucccgcaaagcaaacauu

SEQ ID NO: 13327 - RNA, 20 nt, Artificial Sequence
  targeting sequence with GTCN PAM
ucccaccagguaauguuugc

SEQ ID NO: 13328 - RNA, 20 nt, Artificial Sequence
  targeting sequence with GTCN PAM
gcuauucucaugucacaguu

SEQ ID NO: 13329 - RNA, 20 nt, Artificial Sequence
  targeting sequence with GTCN PAM
caguuaacacuccaucuguu

SEQ ID NO: 13330 - RNA, 20 nt, Artificial Sequence
  targeting sequence with GTCN PAM
auagauagacuucagggugu

SEQ ID NO: 13331 - RNA, 20 nt, Artificial Sequence
  targeting sequence with GTCN PAM
aucuauagacuucuaacagu

SEQ ID NO: 13332 - RNA, 20 nt, Artificial Sequence
  targeting sequence with GTCN PAM
aagccugucugaaauuuuac

SEQ ID NO: 13333 - RNA, 20 nt, Artificial Sequence
  targeting sequence with GTCN PAM
gaaauuuuacacaauuuugu

SEQ ID NO: 13334 - RNA, 20 nt, Artificial Sequence
  targeting sequence with GTCN PAM
uuuccaucaguuuuucaaag

SEQ ID NO: 13335 - RNA, 20 nt, Artificial Sequence
  targeting sequence with GTCN PAM
uucuucccuaccugauuuac

SEQ ID NO: 13336 - RNA, 20 nt, Artificial Sequence
  targeting sequence with GTCN PAM
acagcugggggcggcucugc

SEQ ID NO: 13337 - RNA, 20 nt, Artificial Sequence
  targeting sequence with GTCN PAM
uggaauacuacaacucugaa

SEQ ID NO: 13338 - RNA, 20 nt, Artificial Sequence
  targeting sequence with GTCN PAM
agcccagccagcuacccauc

SEQ ID NO: 13339 - RNA, 20 nt, Artificial Sequence
  targeting sequence with GTCN PAM
ggaccuuggcugaacagaag

SEQ ID NO: 13340 - RNA, 20 nt, Artificial Sequence
  targeting sequence with GTCN PAM
agaccuccagguccagccca

SEQ ID NO: 13341 - RNA, 20 nt, Artificial Sequence
  targeting sequence with GTCN PAM
ucuguucagccaagguccag

SEQ ID NO: 13342 - RNA, 20 nt, Artificial Sequence
  targeting sequence with GTCN PAM
aaaagaaauaauuaguggaa

SEQ ID NO: 13343 - RNA, 20 nt, Artificial Sequence
  targeting sequence with GTCN PAM
gaagggaaaccuuaccuguu

SEQ ID NO: 13344 - RNA, 20 nt, Artificial Sequence
  targeting sequence with GTCN PAM
uugcuuaaauaugccaggag

SEQ ID NO: 13345 - RNA, 20 nt, Artificial Sequence
  targeting sequence with GTCN PAM
ccuaaagcuccuggcauauu

SEQ ID NO: 13346 - RNA, 20 nt, Artificial Sequence
  targeting sequence with GTCN PAM
caccugguguuacuccacaa

SEQ ID NO: 13347 - RNA, 20 nt, Artificial Sequence
  targeting sequence with GTCN PAM
ugaaggaggcacauuuucuu

SEQ ID NO: 13348 - RNA, 20 nt, Artificial Sequence
  targeting sequence with GTCN PAM
aggggggauaccuagugauu

SEQ ID NO: 13349 - RNA, 20 nt, Artificial Sequence
  targeting sequence with GTCN PAM
ucuccacuguaucuucagug

SEQ ID NO: 13350 - RNA, 20 nt, Artificial Sequence
  targeting sequence with GTCN PAM
gaacucacaaaauuagguag

SEQ ID NO: 13351 - RNA, 20 nt, Artificial Sequence
  targeting sequence with GTCN PAM
uuuuagaugaguuggaguuu

SEQ ID NO: 13352 - RNA, 20 nt, Artificial Sequence
  targeting sequence with GTCN PAM
gcuuacuaaacuccaacuca

SEQ ID NO: 13353 - RNA, 20 nt, Artificial Sequence
  targeting sequence with GTCN PAM
cuuuagagagucaauaagca

SEQ ID NO: 13354 - RNA, 20 nt, Artificial Sequence
  targeting sequence with GTCN PAM
auaagcauuucucuaucaga

SEQ ID NO: 13355 - RNA, 20 nt, Artificial Sequence
  targeting sequence with GTCN PAM
gaguuugcauucaugccuug

SEQ ID NO: 13356 - RNA, 20 nt, Artificial Sequence
  targeting sequence with GTCN PAM
uacagcuaguuaguggcaua

SEQ ID NO: 13357 - RNA, 20 nt, Artificial Sequence
  targeting sequence with GTCN PAM
auggaugcaaaaacuaaggc

SEQ ID NO: 13358 - RNA, 20 nt, Artificial Sequence
  targeting sequence with GTCN PAM
cuaucaugacaagacccagg

SEQ ID NO: 13359 - RNA, 20 nt, Artificial Sequence
  targeting sequence with GTCN PAM
ugauagugacaacaaccaua

SEQ ID NO: 13360 - RNA, 20 nt, Artificial Sequence
  targeting sequence with GTCN PAM
ugucaugauagugacaacaa

SEQ ID NO: 13361 - RNA, 20 nt, Artificial Sequence
  targeting sequence with GTCN PAM
uaacuuauguguguacuguu

SEQ ID NO: 13362 - RNA, 20 nt, Artificial Sequence
  targeting sequence with GTCN PAM
uauaugauuauccagugucc

SEQ ID NO: 13363 - RNA, 20 nt, Artificial Sequence
  targeting sequence with GTCN PAM
ucauccaauacagcaaaacc

SEQ ID NO: 13364 - RNA, 20 nt, Artificial Sequence
  targeting sequence with GTCN PAM
cccagaacuaauaacacagu

SEQ ID NO: 13365 - RNA, 20 nt, Artificial Sequence
  targeting sequence with GTCN PAM
gguucacgaaacuaggagac

SEQ ID NO: 13366 - RNA, 20 nt, Artificial Sequence
  targeting sequence with GTCN PAM
ccuaguuucgugaaccugac

SEQ ID NO: 13367 - RNA, 20 nt, Artificial Sequence
  targeting sequence with GTCN PAM
ucauucauuugggagaggug

SEQ ID NO: 13368 - RNA, 20 nt, Artificial Sequence
  targeting sequence with GTCN PAM
aaugagaaacaagagacauu

SEQ ID NO: 13369 - RNA, 20 nt, Artificial Sequence
  targeting sequence with GTCN PAM
cuuguuucucauucgacuac

SEQ ID NO: 13370 - RNA, 20 nt, Artificial Sequence
  targeting sequence with GTCN PAM
agcuuggagaguaauuauau

SEQ ID NO: 13371 - RNA, 20 nt, Artificial Sequence
  targeting sequence with GTCN PAM
caucccaaaggaauguuggu

SEQ ID NO: 13372 - RNA, 20 nt, Artificial Sequence
  targeting sequence with GTCN PAM
auggaguucagcacaagcac

SEQ ID NO: 13373 - RNA, 20 nt, Artificial Sequence
  targeting sequence with GTCN PAM
ucagggaagauaaaguggcu

SEQ ID NO: 13374 - RNA, 20 nt, Artificial Sequence
  targeting sequence with GTCN PAM
ucagaaauaauaugaagagg

SEQ ID NO: 13375 - RNA, 20 nt, Artificial Sequence
  targeting sequence with GTCN PAM
gaaauaauaugaagaggaag

SEQ ID NO: 13376 - RNA, 20 nt, Artificial Sequence
  targeting sequence with GTCN PAM
cuuccucuucauauuauuuc

SEQ ID NO: 13377 - RNA, 20 nt, Artificial Sequence
  targeting sequence with GTCN PAM
agcacugagaaauaauuaaa

SEQ ID NO: 13378 - RNA, 20 nt, Artificial Sequence
  targeting sequence with GTCN PAM
agguacaaaaaaaucacagg

SEQ ID NO: 13379 - RNA, 20 nt, Artificial Sequence
  targeting sequence with GTCN PAM
cuuuauggauucacuguagg

SEQ ID NO: 13380 - RNA, 20 nt, Artificial Sequence
  targeting sequence with GTCN PAM
ggcccugccucuaccacuca

SEQ ID NO: 13381 - RNA, 20 nt, Artificial Sequence
  targeting sequence with GTCN PAM
ucaaaaucacaaaguaggca

SEQ ID NO: 13382 - RNA, 20 nt, Artificial Sequence
  targeting sequence with GTCN PAM
cuagcaauuaguuuaaauuc

SEQ ID NO: 13383 - RNA, 20 nt, Artificial Sequence
  targeting sequence with GTCN PAM
guacuuguuuuuuuaacacu

SEQ ID NO: 13384 - RNA, 20 nt, Artificial Sequence
  targeting sequence with GTCN PAM
aaaaucugucucccuuagca

SEQ ID NO: 13385 - RNA, 20 nt, Artificial Sequence
  targeting sequence with GTCN PAM
cccuuagcaggaaaggaaaa

SEQ ID NO: 13386 - RNA, 20 nt, Artificial Sequence
  targeting sequence with GTCN PAM
uuuccccuguguguaaacac

SEQ ID NO: 13387 - RNA, 20 nt, Artificial Sequence
  targeting sequence with GTCN PAM
aagccagagucuuuuccccu

SEQ ID NO: 13388 - RNA, 20 nt, Artificial Sequence
  targeting sequence with GTCN PAM
gaaucccugcuccaccaaug

SEQ ID NO: 13389 - RNA, 20 nt, Artificial Sequence
  targeting sequence with GTCN PAM
caaagcuaaugcauuggugg

SEQ ID NO: 13390 - RNA, 20 nt, Artificial Sequence
  targeting sequence with GTCN PAM
aaggucacaaagcuaaugca

SEQ ID NO: 13391 - RNA, 20 nt, Artificial Sequence
  targeting sequence with GTCN PAM
cuuuauugugguauacuuuu

SEQ ID NO: 13392 - RNA, 20 nt, Artificial Sequence
  targeting sequence with GTCN PAM
uaucaaguacauaauaagua

SEQ ID NO: 13393 - RNA, 20 nt, Artificial Sequence
  targeting sequence with GTCN PAM
aaaaccaacucuccuguuug

SEQ ID NO: 13394 - RNA, 20 nt, Artificial Sequence
  targeting sequence with GTCN PAM
caaacuccugggcucaagug

SEQ ID NO: 13395 - RNA, 20 nt, Artificial Sequence
  targeting sequence with GTCN PAM
cagcuaccagggggcugagg

SEQ ID NO: 13396 - RNA, 20 nt, Artificial Sequence
  targeting sequence with GTCN PAM
aggcugcagugaccccugau

SEQ ID NO: 13397 - RNA, 20 nt, Artificial Sequence
  targeting sequence with GTCN PAM
cugcagccuagaccuucugg

SEQ ID NO: 13398 - RNA, 20 nt, Artificial Sequence
  targeting sequence with GTCN PAM
cccagauuggagcacagugg

SEQ ID NO: 13399 - RNA, 20 nt, Artificial Sequence
  targeting sequence with GTCN PAM
ccagguuugcugucacccag

SEQ ID NO: 13400 - RNA, 20 nt, Artificial Sequence
  targeting sequence with GTCN PAM
cacucugucaccagguuugc

SEQ ID NO: 13401 - RNA, 20 nt, Artificial Sequence
  targeting sequence with GTCN PAM
caaacagacaacaaacaaaa

SEQ ID NO: 13402 - RNA, 20 nt, Artificial Sequence
  targeting sequence with GTCN PAM
guuugagacaaggucucacu

SEQ ID NO: 13403 - RNA, 20 nt, Artificial Sequence
  targeting sequence with GTCN PAM
gaugcugaaaacacagccag

SEQ ID NO: 13404 - RNA, 20 nt, Artificial Sequence
  targeting sequence with GTCN PAM
ugguggugguucuuuuaagu

SEQ ID NO: 13405 - RNA, 20 nt, Artificial Sequence
  targeting sequence with GTCN PAM
ucuacuuccucucuggggcu

SEQ ID NO: 13406 - RNA, 20 nt, Artificial Sequence
  targeting sequence with GTCN PAM
gaauccaccuuucccucuua

SEQ ID NO: 13407 - RNA, 20 nt, Artificial Sequence
  targeting sequence with GTCN PAM
uaagagggaaagguggauuc

SEQ ID NO: 13408 - RNA, 20 nt, Artificial Sequence
  targeting sequence with GTCN PAM
cuaguuaguaauuuccaugg

SEQ ID NO: 13409 - RNA, 20 nt, Artificial Sequence
  targeting sequence with GTCN PAM
aauaacccauggaaauuacu

SEQ ID NO: 13410 - RNA, 20 nt, Artificial Sequence
  targeting sequence with GTCN PAM
cuaugguacuacuacuuaga

SEQ ID NO: 13411 - RNA, 20 nt, Artificial Sequence
  targeting sequence with GTCN PAM
aaguaguaguaccauagaga

SEQ ID NO: 13412 - RNA, 20 nt, Artificial Sequence
  targeting sequence with GTCN PAM
uuaccugauuguuuugccga

SEQ ID NO: 13413 - RNA, 20 nt, Artificial Sequence
  targeting sequence with GTCN PAM
gcaaaacaaucagguaagga

SEQ ID NO: 13414 - RNA, 20 nt, Artificial Sequence
  targeting sequence with GTCN PAM
caagauauugagaauaacaa

SEQ ID NO: 13415 - RNA, 20 nt, Artificial Sequence
  targeting sequence with GTCN PAM
ggauagaaauauaauuuguu

SEQ ID NO: 13416 - RNA, 20 nt, Artificial Sequence
  targeting sequence with GTCN PAM
auauauuuuuuaagaauauu

SEQ ID NO: 13417 - RNA, 20 nt, Artificial Sequence
  targeting sequence with GTCN PAM
gcauuaaaacuagggguuaa

SEQ ID NO: 13418 - RNA, 20 nt, Artificial Sequence
  targeting sequence with GTCN PAM
aaaaauuuuuuagaguauaa

SEQ ID NO: 13419 - RNA, 20 nt, Artificial Sequence
  targeting sequence with GTCN PAM
cagaaaauuguaaaaacugu

SEQ ID NO: 13420 - RNA, 20 nt, Artificial Sequence
  targeting sequence with GTCN PAM
uuguccaacagagcaaguag

SEQ ID NO: 13421 - RNA, 20 nt, Artificial Sequence
  targeting sequence with GTCN PAM
aacagagcaaguaguaccuc

SEQ ID NO: 13422 - RNA, 20 nt, Artificial Sequence
  targeting sequence with GTCN PAM
uacguucuuuuucuucaugu

SEQ ID NO: 13423 - RNA, 20 nt, Artificial Sequence
  targeting sequence with GTCN PAM
gucuuacguucuuuuucuuc

SEQ ID NO: 13424 - RNA, 20 nt, Artificial Sequence
  targeting sequence with GTCN PAM
gauacaauccagucucagau

SEQ ID NO: 13425 - RNA, 20 nt, Artificial Sequence
  targeting sequence with GTCN PAM
cagauucagauggacuuaug

SEQ ID NO: 13426 - RNA, 20 nt, Artificial Sequence
  targeting sequence with GTCN PAM
aucugaaucugagacuggau

SEQ ID NO: 13427 - RNA, 20 nt, Artificial Sequence
  targeting sequence with GTCN PAM
agggcaucaauucuaccgcu

SEQ ID NO: 13428 - RNA, 20 nt, Artificial Sequence
  targeting sequence with GTCN PAM
cauuuucuccagagccagua

SEQ ID NO: 13429 - RNA, 20 nt, Artificial Sequence
  targeting sequence with GTCN PAM
cuuaaaaaaagguggggugu

SEQ ID NO: 13430 - RNA, 20 nt, Artificial Sequence
  targeting sequence with GTCN PAM
ucccuaaacaccccaccuuu

SEQ ID NO: 13431 - RNA, 20 nt, Artificial Sequence
  targeting sequence with GTCN PAM
guguuuuuuauucuuugcau

SEQ ID NO: 13432 - RNA, 20 nt, Artificial Sequence
  targeting sequence with GTCN PAM
ggcuguugcuauccauuugc

SEQ ID NO: 13433 - RNA, 20 nt, Artificial Sequence
  targeting sequence with GTCN PAM
uucugucaggcuguugcuau

SEQ ID NO: 13434 - RNA, 20 nt, Artificial Sequence
  targeting sequence with GTCN PAM
auaucaccguugucauucug

SEQ ID NO: 13435 - RNA, 20 nt, Artificial Sequence
  targeting sequence with GTCN PAM
gcgggcucucaaguaaguuc

SEQ ID NO: 13436 - RNA, 20 nt, Artificial Sequence
  targeting sequence with GTCN PAM
uaaccaaaaugguuucuaaa

SEQ ID NO: 13437 - RNA, 20 nt, Artificial Sequence
  targeting sequence with GTCN PAM
aaaaacaguuggggugggag

SEQ ID NO: 13438 - RNA, 20 nt, Artificial Sequence
  targeting sequence with GTCN PAM
cuagaaauucaucugugauc

SEQ ID NO: 13439 - RNA, 20 nt, Artificial Sequence
  targeting sequence with GTCN PAM
uaaaucuagaucacagauga

SEQ ID NO: 13440 - RNA, 20 nt, Artificial Sequence
  targeting sequence with GTCN PAM
cacccauuauaaauacagua

SEQ ID NO: 13441 - RNA, 20 nt, Artificial Sequence
  targeting sequence with GTCN PAM
auuugccccccuccccccgu

SEQ ID NO: 13442 - RNA, 20 nt, Artificial Sequence
  targeting sequence with GTCN PAM
gaugcccagcugauggauuu

SEQ ID NO: 13443 - RNA, 20 nt, Artificial Sequence
  targeting sequence with GTCN PAM
ugccuuuagaggcugguggg

SEQ ID NO: 13444 - RNA, 20 nt, Artificial Sequence
  targeting sequence with GTCN PAM
ggccguagcauauuacccac

SEQ ID NO: 13445 - RNA, 20 nt, Artificial Sequence
  targeting sequence with GTCN PAM
gcuguuugaaacagcaaucu

SEQ ID NO: 13446 - RNA, 20 nt, Artificial Sequence
  targeting sequence with GTCN PAM
uuacagguacagcaguuacu

SEQ ID NO: 13447 - RNA, 20 nt, Artificial Sequence
  targeting sequence with GTCN PAM
gcguugggauuuucucucua

SEQ ID NO: 13448 - RNA, 20 nt, Artificial Sequence
  targeting sequence with GTCN PAM
cauuuuuaaaacguuauuua

SEQ ID NO: 13449 - RNA, 20 nt, Artificial Sequence
  targeting sequence with GTCN PAM
gucucauuuuuaaaacguua

SEQ ID NO: 13450 - RNA, 20 nt, Artificial Sequence
  targeting sequence with GTCN PAM
aggguuuucuccagaauggu

SEQ ID NO: 13451 - RNA, 20 nt, Artificial Sequence
  targeting sequence with GTCN PAM
gcaauuuaaaauacuucaga

SEQ ID NO: 13452 - RNA, 20 nt, Artificial Sequence
  targeting sequence with GTCN PAM
gaauucuuuagaucaaucug

SEQ ID NO: 13453 - RNA, 20 nt, Artificial Sequence
  targeting sequence with GTCN PAM
uuuuugcaacuaaaaaauaa

SEQ ID NO: 13454 - RNA, 20 nt, Artificial Sequence
  targeting sequence with GTCN PAM
uuauaaagaaagaaacaaac

SEQ ID NO: 13455 - RNA, 20 nt, Artificial Sequence
  targeting sequence with GTCN PAM
guugcugaaugaaauagauu

SEQ ID NO: 13456 - RNA, 20 nt, Artificial Sequence
  targeting sequence with GTCN PAM
cugaauacuugccugagaug

SEQ ID NO: 13457 - RNA, 20 nt, Artificial Sequence
  targeting sequence with GTCN PAM
cuccaaaaucaucucaggca

SEQ ID NO: 13458 - RNA, 20 nt, Artificial Sequence
  targeting sequence with GTCN PAM
auuuuaaacucucuucacug

SEQ ID NO: 13459 - RNA, 20 nt, Artificial Sequence
  targeting sequence with GTCN PAM
cuuccagugauuuagagcug

SEQ ID NO: 13460 - RNA, 20 nt, Artificial Sequence
  targeting sequence with GTCN PAM
uuuaauuaaaagaaauuugu

SEQ ID NO: 13461 - RNA, 20 nt, Artificial Sequence
  targeting sequence with GTCN PAM
uucagaacuaauaaaauauu

SEQ ID NO: 13462 - RNA, 20 nt, Artificial Sequence
  targeting sequence with GTCN PAM
gugguuaguugaauauuuua

SEQ ID NO: 13463 - RNA, 20 nt, Artificial Sequence
  targeting sequence with GTCN PAM
cuuuuguuugugaaauuugc

SEQ ID NO: 13464 - RNA, 20 nt, Artificial Sequence
  targeting sequence with GTCN PAM
cuaugccuauccuggcauag

SEQ ID NO: 13465 - RNA, 20 nt, Artificial Sequence
  targeting sequence with GTCN PAM
ggcauaggauuaacuaauua

SEQ ID NO: 13466 - RNA, 20 nt, Artificial Sequence
  targeting sequence with GTCN PAM
ucgguuuuuaucuucagcac

SEQ ID NO: 13467 - RNA, 20 nt, Artificial Sequence
  targeting sequence with GTCN PAM
augucuguaaaguuucuaag

SEQ ID NO: 13468 - RNA, 20 nt, Artificial Sequence
  targeting sequence with GTCN PAM
guaaaguuucuaaggcagag

SEQ ID NO: 13469 - RNA, 20 nt, Artificial Sequence
  targeting sequence with GTCN PAM
ccaagcccugggccauggac

SEQ ID NO: 13470 - RNA, 20 nt, Artificial Sequence
  targeting sequence with GTCN PAM
auggcccagggcuuggggac

SEQ ID NO: 13471 - RNA, 20 nt, Artificial Sequence
  targeting sequence with GTCN PAM
caggccgguacugguccaug

SEQ ID NO: 13472 - RNA, 20 nt, Artificial Sequence
  targeting sequence with GTCN PAM
uccaugaaaccacucccugu

SEQ ID NO: 13473 - RNA, 20 nt, Artificial Sequence
  targeting sequence with GTCN PAM
agaguaaugccuuagaacaa

SEQ ID NO: 13474 - RNA, 20 nt, Artificial Sequence
  targeting sequence with GTCN PAM
uuuuagguauuucucuuuug

SEQ ID NO: 13475 - RNA, 20 nt, Artificial Sequence
  targeting sequence with GTCN PAM
caacagauuaucaaaacaua

SEQ ID NO: 13476 - RNA, 20 nt, Artificial Sequence
  targeting sequence with GTCN PAM
guagauaaguuugaaaaagg

SEQ ID NO: 13477 - RNA, 20 nt, Artificial Sequence
  targeting sequence with GTCN PAM
aagagagggaaacaugaaag

SEQ ID NO: 13478 - RNA, 20 nt, Artificial Sequence
  targeting sequence with GTCN PAM
uuucuuaaccuuuuuaaaaa

SEQ ID NO: 13479 - RNA, 20 nt, Artificial Sequence
  targeting sequence with GTCN PAM
ucauuucuuuuaugaaaucc

SEQ ID NO: 13480 - RNA, 20 nt, Artificial Sequence
  targeting sequence with GTCN PAM
aacaacuguuuugagaggau

SEQ ID NO: 13481 - RNA, 20 nt, Artificial Sequence
  targeting sequence with GTCN PAM
ugugauauuuuauuacaaau

SEQ ID NO: 13482 - RNA, 20 nt, Artificial Sequence
  targeting sequence with GTCN PAM
uuguggagauuccuaauuug

SEQ ID NO: 13483 - RNA, 20 nt, Artificial Sequence
  targeting sequence with GTCN PAM
auggauauuggucuuugugg

SEQ ID NO: 13484 - RNA, 20 nt, Artificial Sequence
  targeting sequence with GTCN PAM
uuagcuucauugaaugcugu

SEQ ID NO: 13485 - RNA, 20 nt, Artificial Sequence
  targeting sequence with GTCN PAM
aaggaagguuuucucucucc

SEQ ID NO: 13486 - RNA, 20 nt, Artificial Sequence
  targeting sequence with GTCN PAM
uucacauggcaguuuaccug

SEQ ID NO: 13487 - RNA, 20 nt, Artificial Sequence
  targeting sequence with GTCN PAM
ggacugaguagacaguucug

SEQ ID NO: 13488 - RNA, 20 nt, Artificial Sequence
  targeting sequence with GTCN PAM
agacuuuauacacuaauuaa

SEQ ID NO: 13489 - RNA, 20 nt, Artificial Sequence
  targeting sequence with GTCN PAM
acucaguccagacuuuauac

SEQ ID NO: 13490 - RNA, 20 nt, Artificial Sequence
  targeting sequence with GTCN PAM
ugugacacuggcacauacuu

SEQ ID NO: 13491 - RNA, 20 nt, Artificial Sequence
  targeting sequence with GTCN PAM
caggacaaggaucuaaauuc

SEQ ID NO: 13492 - RNA, 20 nt, Artificial Sequence
  targeting sequence with GTCN PAM
uuucuucucgccuuuuuuaa

SEQ ID NO: 13493 - RNA, 20 nt, Artificial Sequence
  targeting sequence with GTCN PAM
auucuuaccaagcugguuaa

SEQ ID NO: 13494 - RNA, 20 nt, Artificial Sequence
  targeting sequence with GTCN PAM
uuguucggccuauggggccg

SEQ ID NO: 13495 - RNA, 20 nt, Artificial Sequence
  targeting sequence with GTCN PAM
uccccucggccccauaggcc

SEQ ID NO: 13496 - RNA, 20 nt, Artificial Sequence
  targeting sequence with GTCN PAM
gcuccaucuucaccagaaau

SEQ ID NO: 13497 - RNA, 20 nt, Artificial Sequence
  targeting sequence with GTCN PAM
aguauaaaguggcuauuuuu

SEQ ID NO: 13498 - RNA, 20 nt, Artificial Sequence
  targeting sequence with GTCN PAM
aucaguucucccaacuaauu

SEQ ID NO: 13499 - RNA, 20 nt, Artificial Sequence
  targeting sequence with GTCN PAM
uguaagaacaaaguauugaa

SEQ ID NO: 13500 - RNA, 20 nt, Artificial Sequence
  targeting sequence with GTCN PAM
uauuucucacaugaaaaagu

SEQ ID NO: 13501 - RNA, 20 nt, Artificial Sequence
  targeting sequence with GTCN PAM
ggaaaguguuuacuuuuuca

SEQ ID NO: 13502 - RNA, 20 nt, Artificial Sequence
  targeting sequence with GTCN PAM
cuuccauguaauuugcugug

SEQ ID NO: 13503 - RNA, 20 nt, Artificial Sequence
  targeting sequence with GTCN PAM
gcguuguacggcaggaagcu

SEQ ID NO: 13504 - RNA, 20 nt, Artificial Sequence
  targeting sequence with GTCN PAM
agucagcguuguacggcagg

SEQ ID NO: 13505 - RNA, 20 nt, Artificial Sequence
  targeting sequence with GTCN PAM
gaucagaacuccccaguauu

SEQ ID NO: 13506 - RNA, 20 nt, Artificial Sequence
  targeting sequence with GTCN PAM
uguuauaaagcaaacccaua

SEQ ID NO: 13507 - RNA, 20 nt, Artificial Sequence
  targeting sequence with GTCN PAM
ugacaaucuaaaacaaaggg

SEQ ID NO: 13508 - RNA, 20 nt, Artificial Sequence
  targeting sequence with GTCN PAM
agacaagaaaaacuuuuauu

SEQ ID NO: 13509 - RNA, 20 nt, Artificial Sequence
  targeting sequence with GTCN PAM
ggauacuucaguugugggcc

SEQ ID NO: 13510 - RNA, 20 nt, Artificial Sequence
  targeting sequence with GTCN PAM
ucucuaauuagucacaccuc

SEQ ID NO: 13511 - RNA, 20 nt, Artificial Sequence
  targeting sequence with GTCN PAM
caccucuacauaagugaaaa

SEQ ID NO: 13512 - RNA, 20 nt, Artificial Sequence
  targeting sequence with GTCN PAM
auauucuccuccaaagcauu

SEQ ID NO: 13513 - RNA, 20 nt, Artificial Sequence
  targeting sequence with GTCN PAM
cgucauuuaggucaaauucu

SEQ ID NO: 13514 - RNA, 20 nt, Artificial Sequence
  targeting sequence with GTCN PAM
uuuaggucaaauucuucuau

SEQ ID NO: 13515 - RNA, 20 nt, Artificial Sequence
  targeting sequence with GTCN PAM
aauucuucuauaacuguguc

SEQ ID NO: 13516 - RNA, 20 nt, Artificial Sequence
  targeting sequence with GTCN PAM
uuaaauuuauaccacuuucc

SEQ ID NO: 13517 - RNA, 20 nt, Artificial Sequence
  targeting sequence with GTCN PAM
gaucucuggguucuagaggg

SEQ ID NO: 13518 - RNA, 20 nt, Artificial Sequence
  targeting sequence with GTCN PAM
uuaaugaaggaauaguagug

SEQ ID NO: 13519 - RNA, 20 nt, Artificial Sequence
  targeting sequence with GTCN PAM
ucguacacagugggcaggca

SEQ ID NO: 13520 - RNA, 20 nt, Artificial Sequence
  targeting sequence with GTCN PAM
gugucaucguacacaguggg

SEQ ID NO: 13521 - RNA, 20 nt, Artificial Sequence
  targeting sequence with GTCN PAM
uuuugcuucuacauaguuuc

SEQ ID NO: 13522 - RNA, 20 nt, Artificial Sequence
  targeting sequence with GTCN PAM
gcuuucccagucaaacccaa

SEQ ID NO: 13523 - RNA, 20 nt, Artificial Sequence
  targeting sequence with GTCN PAM
aacccaaaucucauuaggug

SEQ ID NO: 13524 - RNA, 20 nt, Artificial Sequence
  targeting sequence with GTCN PAM
ugguaauucaccuaaugaga

SEQ ID NO: 13525 - RNA, 20 nt, Artificial Sequence
  targeting sequence with GTCN PAM
uuuucacuguuauucucuaa

SEQ ID NO: 13526 - RNA, 20 nt, Artificial Sequence
  targeting sequence with GTCN PAM
aaagaaauuuccaaacucug

SEQ ID NO: 13527 - RNA, 20 nt, Artificial Sequence
  targeting sequence with GTCN PAM
gaguuuggaaauuucuuugg

SEQ ID NO: 13528 - RNA, 20 nt, Artificial Sequence
  targeting sequence with GTCN PAM
cuccuagauugagagccaug

SEQ ID NO: 13529 - RNA, 20 nt, Artificial Sequence
  targeting sequence with GTCN PAM
acagaucuauaaguauuuag

SEQ ID NO: 13530 - RNA, 20 nt, Artificial Sequence
  targeting sequence with GTCN PAM
cuuaacaaaugcaaaauuua

SEQ ID NO: 13531 - RNA, 20 nt, Artificial Sequence
  targeting sequence with GTCN PAM
gugauaucuucacucaccug

SEQ ID NO: 13532 - RNA, 20 nt, Artificial Sequence
  targeting sequence with GTCN PAM
ucacaggugagugaagauau

SEQ ID NO: 13533 - RNA, 20 nt, Artificial Sequence
  targeting sequence with GTCN PAM
uuacagaucuucugaucaga

SEQ ID NO: 13534 - RNA, 20 nt, Artificial Sequence
  targeting sequence with GTCN PAM
cuccccauuuucuguuggaa

SEQ ID NO: 13535 - RNA, 20 nt, Artificial Sequence
  targeting sequence with GTCN PAM
uuaaauugcaauguguuaau

SEQ ID NO: 13536 - RNA, 20 nt, Artificial Sequence
  targeting sequence with GTCN PAM
uucugguaguaucagcugug

SEQ ID NO: 13537 - RNA, 20 nt, Artificial Sequence
  targeting sequence with GTCN PAM
cauugaucagauggaugaau

SEQ ID NO: 13538 - RNA, 20 nt, Artificial Sequence
  targeting sequence with GTCN PAM
acauccuaauagugaaccug

SEQ ID NO: 13539 - RNA, 20 nt, Artificial Sequence
  targeting sequence with GTCN PAM
uuaaauaaagaacacuuuuu

SEQ ID NO: 13540 - RNA, 20 nt, Artificial Sequence
  targeting sequence with GTCN PAM
ggggaaugauaugaacaaau

SEQ ID NO: 13541 - RNA, 20 nt, Artificial Sequence
  targeting sequence with GTCN PAM
uucaauuccuaggaauuugc

SEQ ID NO: 13542 - RNA, 20 nt, Artificial Sequence
  targeting sequence with GTCN PAM
aaagagagacugcacuuggu

SEQ ID NO: 13543 - RNA, 20 nt, Artificial Sequence
  targeting sequence with GTCN PAM
cucuuuggacauuuaaugga

SEQ ID NO: 13544 - RNA, 20 nt, Artificial Sequence
  targeting sequence with GTCN PAM
gugucaucauccacugaaag

SEQ ID NO: 13545 - RNA, 20 nt, Artificial Sequence
  targeting sequence with GTCN PAM
ucauccacugaaaguaauga

SEQ ID NO: 13546 - RNA, 20 nt, Artificial Sequence
  targeting sequence with GTCN PAM
uuacuuucaguggaugauga

SEQ ID NO: 13547 - RNA, 20 nt, Artificial Sequence
  targeting sequence with GTCN PAM
aguaauaccagguucucuac

SEQ ID NO: 13548 - RNA, 20 nt, Artificial Sequence
  targeting sequence with GTCN PAM
accaugagcacuuuacaaua

SEQ ID NO: 13549 - RNA, 20 nt, Artificial Sequence
  targeting sequence with GTCN PAM
guaacuuuauggaauauaau

SEQ ID NO: 13550 - RNA, 20 nt, Artificial Sequence
  targeting sequence with GTCN PAM
aguccaucuguaauacaggc

SEQ ID NO: 13551 - RNA, 20 nt, Artificial Sequence
  targeting sequence with GTCN PAM
aucuguaauacaggcagcuu

SEQ ID NO: 13552 - RNA, 20 nt, Artificial Sequence
  targeting sequence with GTCN PAM
uuacacauuucaggagcuac

SEQ ID NO: 13553 - RNA, 20 nt, Artificial Sequence
  targeting sequence with GTCN PAM
uguuuuaggaaaccccaaaa

SEQ ID NO: 13554 - RNA, 20 nt, Artificial Sequence
  targeting sequence with GTCN PAM
uccagcagcuguauaugcaa

SEQ ID NO: 13555 - RNA, 20 nt, Artificial Sequence
  targeting sequence with GTCN PAM
aguucaggguuuguggggcu

SEQ ID NO: 13556 - RNA, 20 nt, Artificial Sequence
  targeting sequence with GTCN PAM
ggauccuucaugguaaucac

SEQ ID NO: 13557 - RNA, 20 nt, Artificial Sequence
  targeting sequence with GTCN PAM
gauguuaaugaagaguaagu

SEQ ID NO: 13558 - RNA, 20 nt, Artificial Sequence
  targeting sequence with GTCN PAM
uagaaauaauccugcuguaa

SEQ ID NO: 13559 - RNA, 20 nt, Artificial Sequence
  targeting sequence with GTCN PAM
aaagcauagauuuaaaaaaa

SEQ ID NO: 13560 - RNA, 20 nt, Artificial Sequence
  targeting sequence with GTCN PAM
agaaaaccuacaucaaacuc

SEQ ID NO: 13561 - RNA, 20 nt, Artificial Sequence
  targeting sequence with GTCN PAM
ggcuggugaugcauagaaag

SEQ ID NO: 13562 - RNA, 20 nt, Artificial Sequence
  targeting sequence with GTCN PAM
uugugauguuggcugauagu

SEQ ID NO: 13563 - RNA, 20 nt, Artificial Sequence
  targeting sequence with GTCN PAM
uuuguuucuagguguaguac

SEQ ID NO: 13564 - RNA, 20 nt, Artificial Sequence
  targeting sequence with GTCN PAM
auuucaacaaugaauaaucu

SEQ ID NO: 13565 - RNA, 20 nt, Artificial Sequence
  targeting sequence with GTCN PAM
uccuaagaagaucuuaggau

SEQ ID NO: 13566 - RNA, 20 nt, Artificial Sequence
  targeting sequence with GTCN PAM
aaaagccucauaagcccccu

SEQ ID NO: 13567 - RNA, 20 nt, Artificial Sequence
  targeting sequence with GTCN PAM
ugcuggucuaaaagccucau

SEQ ID NO: 13568 - RNA, 20 nt, Artificial Sequence
  targeting sequence with GTCN PAM
ucagugccuggugucgugcu

SEQ ID NO: 13569 - RNA, 20 nt, Artificial Sequence
  targeting sequence with GTCN PAM
uuugcuucuuaucugaacuu

SEQ ID NO: 13570 - RNA, 20 nt, Artificial Sequence
  targeting sequence with GTCN PAM
uuugcaacccugaaguucag

SEQ ID NO: 13571 - RNA, 20 nt, Artificial Sequence
  targeting sequence with GTCN PAM
uuucccaccaaaaccuucaa

SEQ ID NO: 13572 - RNA, 20 nt, Artificial Sequence
  targeting sequence with GTCN PAM
auuucaauaaccacugaaau

SEQ ID NO: 13573 - RNA, 20 nt, Artificial Sequence
  targeting sequence with GTCN PAM
acauuacaaagagaucuuuc

SEQ ID NO: 13574 - RNA, 20 nt, Artificial Sequence
  targeting sequence with GTCN PAM
guguauccuauauuauccac

SEQ ID NO: 13575 - RNA, 20 nt, Artificial Sequence
  targeting sequence with GTCN PAM
uccaucugugagucugugua

SEQ ID NO: 13576 - RNA, 20 nt, Artificial Sequence
  targeting sequence with GTCN PAM
caaaagauuuuguuaacuug

SEQ ID NO: 13577 - RNA, 20 nt, Artificial Sequence
  targeting sequence with GTCN PAM
uguugacugauggcggcacu

SEQ ID NO: 13578 - RNA, 20 nt, Artificial Sequence
  targeting sequence with GTCN PAM
acaggacuuucauccaaagu

SEQ ID NO: 13579 - RNA, 20 nt, Artificial Sequence
  targeting sequence with GTCN PAM
uucuccagcuggcagugccg

SEQ ID NO: 13580 - RNA, 20 nt, Artificial Sequence
  targeting sequence with GTCN PAM
ucuaacaaugguuuaaugag

SEQ ID NO: 13581 - RNA, 20 nt, Artificial Sequence
  targeting sequence with GTCN PAM
agcuuucacuuuagaaacag

SEQ ID NO: 13582 - RNA, 20 nt, Artificial Sequence
  targeting sequence with GTCN PAM
uuggcacuucuguuucuaaa

SEQ ID NO: 13583 - RNA, 20 nt, Artificial Sequence
  targeting sequence with GTCN PAM
ucugaauacaauuuauaaua

SEQ ID NO: 13584 - RNA, 20 nt, Artificial Sequence
  targeting sequence with GTCN PAM
ucuuuuaagggugauucuca

SEQ ID NO: 13585 - RNA, 20 nt, Artificial Sequence
  targeting sequence with GTCN PAM
gucuucuuuuaagggugauu

SEQ ID NO: 13586 - RNA, 20 nt, Artificial Sequence
  targeting sequence with GTCN PAM
uuaaacaacauagagaauuu

SEQ ID NO: 13587 - RNA, 20 nt, Artificial Sequence
  targeting sequence with GTCN PAM
guuauuuuaguggcuaacaa

SEQ ID NO: 13588 - RNA, 20 nt, Artificial Sequence
  targeting sequence with GTCN PAM
auuuuccauggaacacuugg

SEQ ID NO: 13589 - RNA, 20 nt, Artificial Sequence
  targeting sequence with GTCN PAM
ugaugaggcguaagugcccu

SEQ ID NO: 13590 - RNA, 20 nt, Artificial Sequence
  targeting sequence with GTCN PAM
gcuucacuggucucacauuc

SEQ ID NO: 13591 - RNA, 20 nt, Artificial Sequence
  targeting sequence with GTCN PAM
cacauucagcuguacgauua

SEQ ID NO: 13592 - RNA, 20 nt, Artificial Sequence
  targeting sequence with GTCN PAM
ggaguucgagaccagccugg

SEQ ID NO: 13593 - RNA, 20 nt, Artificial Sequence
  targeting sequence with GTCN PAM
ggaguacaguggcgugaucu

SEQ ID NO: 13594 - RNA, 20 nt, Artificial Sequence
  targeting sequence with GTCN PAM
aaaacaggagguggccaggc

SEQ ID NO: 13595 - RNA, 20 nt, Artificial Sequence
  targeting sequence with GTCN PAM
gucaaaaacaggagguggcc

SEQ ID NO: 13596 - RNA, 20 nt, Artificial Sequence
  targeting sequence with GTCN PAM
aaaagaaauuucauacaaag

SEQ ID NO: 13597 - RNA, 20 nt, Artificial Sequence
  targeting sequence with GTCN PAM
ugacguucuuuaccaauugc

SEQ ID NO: 13598 - RNA, 20 nt, Artificial Sequence
  targeting sequence with GTCN PAM
agaccaggaggaaaaaaaau

SEQ ID NO: 13599 - RNA, 20 nt, Artificial Sequence
  targeting sequence with GTCN PAM
uucucuccgguguagucugu

SEQ ID NO: 13600 - RNA, 20 nt, Artificial Sequence
  targeting sequence with GTCN PAM
aaggcucauauuuuaauuac

SEQ ID NO: 13601 - RNA, 20 nt, Artificial Sequence
  targeting sequence with GTCN PAM
uuaaugaauugagaacauuu

SEQ ID NO: 13602 - RNA, 20 nt, Artificial Sequence
  targeting sequence with GTCN PAM
uuuacuuacuugucagauca

SEQ ID NO: 13603 - RNA, 20 nt, Artificial Sequence
  targeting sequence with GTCN PAM
gaucaucuaauaacuggcau

SEQ ID NO: 13604 - RNA, 20 nt, Artificial Sequence
  targeting sequence with GTCN PAM
aaaaaacagaaagguuucag

SEQ ID NO: 13605 - RNA, 20 nt, Artificial Sequence
  targeting sequence with GTCN PAM
uuuuuuauaaccauaauucu

SEQ ID NO: 13606 - RNA, 20 nt, Artificial Sequence
  targeting sequence with GTCN PAM
gaggauuaaaagaaaaacau

SEQ ID NO: 13607 - RNA, 20 nt, Artificial Sequence
  targeting sequence with GTCN PAM
aauucagcuuaaaucuugau

SEQ ID NO: 13608 - RNA, 20 nt, Artificial Sequence
  targeting sequence with GTCN PAM
aagaaagaagucaagauuuu

SEQ ID NO: 13609 - RNA, 20 nt, Artificial Sequence
  targeting sequence with GTCN PAM
agaauggaucaaagaaacca

SEQ ID NO: 13610 - RNA, 20 nt, Artificial Sequence
  targeting sequence with GTCN PAM
uaauauauuuucuaauuuuc

SEQ ID NO: 13611 - RNA, 20 nt, Artificial Sequence
  targeting sequence with GTCN PAM
cuaucuucuucaguucugcu

SEQ ID NO: 13612 - RNA, 20 nt, Artificial Sequence
  targeting sequence with GTCN PAM
auuguagaucuuuccugcuu

SEQ ID NO: 13613 - RNA, 20 nt, Artificial Sequence
  targeting sequence with GTCN PAM
cagagauucugguacguugu

SEQ ID NO: 13614 - RNA, 20 nt, Artificial Sequence
  targeting sequence with GTCN PAM
uuguucucauugguuucaaa

SEQ ID NO: 13615 - RNA, 20 nt, Artificial Sequence
  targeting sequence with GTCN PAM
uucaggagcagguuguucag

SEQ ID NO: 13616 - RNA, 20 nt, Artificial Sequence
  targeting sequence with GTCN PAM
auuaggucugcuugguccag

SEQ ID NO: 13617 - RNA, 20 nt, Artificial Sequence
  targeting sequence with GTCN PAM
gcuugguccagagcugaguu

SEQ ID NO: 13618 - RNA, 20 nt, Artificial Sequence
  targeting sequence with GTCN PAM
agagcugaguucaaguccug

SEQ ID NO: 13619 - RNA, 20 nt, Artificial Sequence
  targeting sequence with GTCN PAM
ugggagggugugugugucug

SEQ ID NO: 13620 - RNA, 20 nt, Artificial Sequence
  targeting sequence with GTCN PAM
aaucccugaauagaccaaua

SEQ ID NO: 13621 - RNA, 20 nt, Artificial Sequence
  targeting sequence with GTCN PAM
auucagggauucgacuucuu

SEQ ID NO: 13622 - RNA, 20 nt, Artificial Sequence
  targeting sequence with GTCN PAM
ugggccuuuuuugguuggua

SEQ ID NO: 13623 - RNA, 20 nt, Artificial Sequence
  targeting sequence with GTCN PAM
cucuuuuucuguugcuugga

SEQ ID NO: 13624 - RNA, 20 nt, Artificial Sequence
  targeting sequence with GTCN PAM
uccuaucugaauacccuuua

SEQ ID NO: 13625 - RNA, 20 nt, Artificial Sequence
  targeting sequence with GTCN PAM
aacugucucuguuugcagau

SEQ ID NO: 13626 - RNA, 20 nt, Artificial Sequence
  targeting sequence with GTCN PAM
cuguuugcagaugacaugau

SEQ ID NO: 13627 - RNA, 20 nt, Artificial Sequence
  targeting sequence with GTCN PAM
ucugcaaacagagacaguuu

SEQ ID NO: 13628 - RNA, 20 nt, Artificial Sequence
  targeting sequence with GTCN PAM
caggauacaaaaucaaugug

SEQ ID NO: 13629 - RNA, 20 nt, Artificial Sequence
  targeting sequence with GTCN PAM
auuauucguguauaggaaug

SEQ ID NO: 13630 - RNA, 20 nt, Artificial Sequence
  targeting sequence with GTCN PAM
uccacaugccuuguaaguug

SEQ ID NO: 13631 - RNA, 20 nt, Artificial Sequence
  targeting sequence with GTCN PAM
ucucuuauuuccuugagcag

SEQ ID NO: 13632 - RNA, 20 nt, Artificial Sequence
  targeting sequence with GTCN PAM
gugguagcuugauggggaua

SEQ ID NO: 13633 - RNA, 20 nt, Artificial Sequence
  targeting sequence with GTCN PAM
uggcuauacagguucuguuu

SEQ ID NO: 13634 - RNA, 20 nt, Artificial Sequence
  targeting sequence with GTCN PAM
gguagcaugaugccuccagc

SEQ ID NO: 13635 - RNA, 20 nt, Artificial Sequence
  targeting sequence with GTCN PAM
auugaauccuuuucuuguuu

SEQ ID NO: 13636 - RNA, 20 nt, Artificial Sequence
  targeting sequence with GTCN PAM
accuaaagguuuguugguuu

SEQ ID NO: 13637 - RNA, 20 nt, Artificial Sequence
  targeting sequence with GTCN PAM
agggcuuuucuuuguuggga

SEQ ID NO: 13638 - RNA, 20 nt, Artificial Sequence
  targeting sequence with GTCN PAM
uuuaguucuuuuucuugccu

SEQ ID NO: 13639 - RNA, 20 nt, Artificial Sequence
  targeting sequence with GTCN PAM
ucuguuaacagauaauuuua

SEQ ID NO: 13640 - RNA, 20 nt, Artificial Sequence
  targeting sequence with GTCN PAM
gcaguccggccugggcgaca

SEQ ID NO: 13641 - RNA, 20 nt, Artificial Sequence
  targeting sequence with GTCN PAM
ggccugggcgacagagcgag

SEQ ID NO: 13642 - RNA, 20 nt, Artificial Sequence
  targeting sequence with GTCN PAM
cccaggccggacugcggacu

SEQ ID NO: 13643 - RNA, 20 nt, Artificial Sequence
  targeting sequence with GTCN PAM
cgcucugucgcccaggccgg

SEQ ID NO: 13644 - RNA, 20 nt, Artificial Sequence
  targeting sequence with GTCN PAM
caaaaaaaaaaaaaaaaaaa

SEQ ID NO: 13645 - RNA, 20 nt, Artificial Sequence
  targeting sequence with GTCN PAM
uuuguuuccuuaaguugguu

SEQ ID NO: 13646 - RNA, 20 nt, Artificial Sequence
  targeting sequence with GTCN PAM
ucuuuaauuucuuucagcaa

SEQ ID NO: 13647 - RNA, 20 nt, Artificial Sequence
  targeting sequence with GTCN PAM
uuuuauuaugucaucuuuaa

SEQ ID NO: 13648 - RNA, 20 nt, Artificial Sequence
  targeting sequence with GTCN PAM
uucaauccuugaacacaaga

SEQ ID NO: 13649 - RNA, 20 nt, Artificial Sequence
  targeting sequence with GTCN PAM
caaaguuuucccuguuuucu

SEQ ID NO: 13650 - RNA, 20 nt, Artificial Sequence
  targeting sequence with GTCN PAM
uagccaggaaauuauggcca

SEQ ID NO: 13651 - RNA, 20 nt, Artificial Sequence
  targeting sequence with GTCN PAM
uguguauguauuuucucuuu

SEQ ID NO: 13652 - RNA, 20 nt, Artificial Sequence
  targeting sequence with GTCN PAM
aucaccaaacugggaaaaua

SEQ ID NO: 13653 - RNA, 20 nt, Artificial Sequence
  targeting sequence with GTCN PAM
aaagucaaucaccaaacugg

SEQ ID NO: 13654 - RNA, 20 nt, Artificial Sequence
  targeting sequence with GTCN PAM
aucagagguagguaauaaaa

SEQ ID NO: 13655 - RNA, 20 nt, Artificial Sequence
  targeting sequence with GTCN PAM
ccaacuaguauuaugagagg

SEQ ID NO: 13656 - RNA, 20 nt, Artificial Sequence
  targeting sequence with GTCN PAM
gucugacuaagaguguacag

SEQ ID NO: 13657 - RNA, 20 nt, Artificial Sequence
  targeting sequence with GTCN PAM
gacuaagaguguacagcuga

SEQ ID NO: 13658 - RNA, 20 nt, Artificial Sequence
  targeting sequence with GTCN PAM
gacagacacaucagcgcauc

SEQ ID NO: 13659 - RNA, 20 nt, Artificial Sequence
  targeting sequence with GTCN PAM
uuugcugcugaucauguaau

SEQ ID NO: 13660 - RNA, 20 nt, Artificial Sequence
  targeting sequence with GTCN PAM
guccuuugcugcugaucaug

SEQ ID NO: 13661 - RNA, 20 nt, Artificial Sequence
  targeting sequence with GTCN PAM
caacauguugauucaugucu

SEQ ID NO: 13662 - RNA, 20 nt, Artificial Sequence
  targeting sequence with GTCN PAM
uguuguuuugugagcugucu

SEQ ID NO: 13663 - RNA, 20 nt, Artificial Sequence
  targeting sequence with GTCN PAM
acccccuuguaaagauuugg

SEQ ID NO: 13664 - RNA, 20 nt, Artificial Sequence
  targeting sequence with GTCN PAM
aaguaggaagcaauggcagc

SEQ ID NO: 13665 - RNA, 20 nt, Artificial Sequence
  targeting sequence with GTCN PAM
cuucuuguuacgugccuaca

SEQ ID NO: 13666 - RNA, 20 nt, Artificial Sequence
  targeting sequence with GTCN PAM
uugguggauacagacuguug

SEQ ID NO: 13667 - RNA, 20 nt, Artificial Sequence
  targeting sequence with GTCN PAM
guauccaccaaagacucgcu

SEQ ID NO: 13668 - RNA, 20 nt, Artificial Sequence
  targeting sequence with GTCN PAM
aacacagauucccgcaugca

SEQ ID NO: 13669 - RNA, 20 nt, Artificial Sequence
  targeting sequence with GTCN PAM
uccugcucaaucucuauuuu

SEQ ID NO: 13670 - RNA, 20 nt, Artificial Sequence
  targeting sequence with GTCN PAM
ugaaaccaaucauuguggca

SEQ ID NO: 13671 - RNA, 20 nt, Artificial Sequence
  targeting sequence with GTCN PAM
cccauuuuugugacucuggc

SEQ ID NO: 13672 - RNA, 20 nt, Artificial Sequence
  targeting sequence with GTCN PAM
caaaaaugggagacccucuu

SEQ ID NO: 13673 - RNA, 20 nt, Artificial Sequence
  targeting sequence with GTCN PAM
cuuuuuaaucaguaccugaa

SEQ ID NO: 13674 - RNA, 20 nt, Artificial Sequence
  targeting sequence with GTCN PAM
guuucgaauuccagcaggac

SEQ ID NO: 13675 - RNA, 20 nt, Artificial Sequence
  targeting sequence with GTCN PAM
ugcuggaauucgaaacagac

SEQ ID NO: 13676 - RNA, 20 nt, Artificial Sequence
  targeting sequence with GTCN PAM
ugcagccgcagcccaugaca

SEQ ID NO: 13677 - RNA, 20 nt, Artificial Sequence
  targeting sequence with GTCN PAM
ugggcugcggcugcaggacg

SEQ ID NO: 13678 - RNA, 20 nt, Artificial Sequence
  targeting sequence with GTCN PAM
aaagaauggaacaaguauua

SEQ ID NO: 13679 - RNA, 20 nt, Artificial Sequence
  targeting sequence with GTCN PAM
cucuuauucagaauguccug

SEQ ID NO: 13680 - RNA, 20 nt, Artificial Sequence
  targeting sequence with GTCN PAM
ugaauacacaaaucacuuac

SEQ ID NO: 13681 - RNA, 20 nt, Artificial Sequence
  targeting sequence with GTCN PAM
ucuauuaggguugaggaaau

SEQ ID NO: 13682 - RNA, 20 nt, Artificial Sequence
  targeting sequence with GTCN PAM
gauaggucuucuauuagggu

SEQ ID NO: 13683 - RNA, 20 nt, Artificial Sequence
  targeting sequence with GTCN PAM
gugucugauaggucuucuau

SEQ ID NO: 13684 - RNA, 20 nt, Artificial Sequence
  targeting sequence with GTCN PAM
guaggaugacuuuucugggg

SEQ ID NO: 13685 - RNA, 20 nt, Artificial Sequence
  targeting sequence with GTCN PAM
uccuaccgacaguuguccgu

SEQ ID NO: 13686 - RNA, 20 nt, Artificial Sequence
  targeting sequence with GTCN PAM
uuaugugguaccccagaaaa

SEQ ID NO: 13687 - RNA, 20 nt, Artificial Sequence
  targeting sequence with GTCN PAM
gcuugucugccggcugacau

SEQ ID NO: 13688 - RNA, 20 nt, Artificial Sequence
  targeting sequence with GTCN PAM
gccggcugacauuucggaau

SEQ ID NO: 13689 - RNA, 20 nt, Artificial Sequence
  targeting sequence with GTCN PAM
gccggcagacaagcagacag

SEQ ID NO: 13690 - RNA, 20 nt, Artificial Sequence
  targeting sequence with GTCN PAM
ucaucuaauaacgugggcau

SEQ ID NO: 13691 - RNA, 20 nt, Artificial Sequence
  targeting sequence with GTCN PAM
gacaaguaaaaaucuuaaaa

SEQ ID NO: 13692 - RNA, 20 nt, Artificial Sequence
  targeting sequence with GTCN PAM
gacaaacaaugcccacguua

SEQ ID NO: 13693 - RNA, 20 nt, Artificial Sequence
  targeting sequence with GTCN PAM
agcuguuucuuuuuaagauu

SEQ ID NO: 13694 - RNA, 20 nt, Artificial Sequence
  targeting sequence with GTCN PAM
auucauacuauuuaaaaaca

SEQ ID NO: 13695 - RNA, 20 nt, Artificial Sequence
  targeting sequence with GTCN PAM
uaccaggcaauacuugacuu

SEQ ID NO: 13696 - RNA, 20 nt, Artificial Sequence
  targeting sequence with GTCN PAM
acagcuugcaagguauguaa

SEQ ID NO: 13697 - RNA, 20 nt, Artificial Sequence
  targeting sequence with GTCN PAM
acuucugaugggauggaguc

SEQ ID NO: 13698 - RNA, 20 nt, Artificial Sequence
  targeting sequence with GTCN PAM
cucugcaugacauuuacaac

SEQ ID NO: 13699 - RNA, 20 nt, Artificial Sequence
  targeting sequence with GTCN PAM
ugcagagagacuccauccca

SEQ ID NO: 13700 - RNA, 20 nt, Artificial Sequence
  targeting sequence with GTCN PAM
uuaauauccugccuuuuuuu

SEQ ID NO: 13701 - RNA, 20 nt, Artificial Sequence
  targeting sequence with GTCN PAM
ucaucaauuacuuaguuucu

SEQ ID NO: 13702 - RNA, 20 nt, Artificial Sequence
  targeting sequence with GTCN PAM
ucacaguagccuguaagacc

SEQ ID NO: 13703 - RNA, 20 nt, Artificial Sequence
  targeting sequence with GTCN PAM
uacaggcuacugugaagacu

SEQ ID NO: 13704 - RNA, 20 nt, Artificial Sequence
  targeting sequence with GTCN PAM
cgcucccuuaucuccuucag

SEQ ID NO: 13705 - RNA, 20 nt, Artificial Sequence
  targeting sequence with GTCN PAM
uugcuagaugucaccccagc

SEQ ID NO: 13706 - RNA, 20 nt, Artificial Sequence
  targeting sequence with GTCN PAM
ccccagcgaagcuuuuccug

SEQ ID NO: 13707 - RNA, 20 nt, Artificial Sequence
  targeting sequence with GTCN PAM
aaauaaagacauugaacauu

SEQ ID NO: 13708 - RNA, 20 nt, Artificial Sequence
  targeting sequence with GTCN PAM
ggcacagagaagcuggguag

SEQ ID NO: 13709 - RNA, 20 nt, Artificial Sequence
  targeting sequence with GTCN PAM
ugggaaccucaguugccugg

SEQ ID NO: 13710 - RNA, 20 nt, Artificial Sequence
  targeting sequence with GTCN PAM
ucaugcucucacucacccuu

SEQ ID NO: 13711 - RNA, 20 nt, Artificial Sequence
  targeting sequence with GTCN PAM
guuugaaauaaggugaauuu

SEQ ID NO: 13712 - RNA, 20 nt, Artificial Sequence
  targeting sequence with GTCN PAM
caugucaguuugaaauaagg

SEQ ID NO: 13713 - RNA, 20 nt, Artificial Sequence
  targeting sequence with GTCN PAM
ucaucagcuguuggcaugag

SEQ ID NO: 13714 - RNA, 20 nt, Artificial Sequence
  targeting sequence with GTCN PAM
uuauuuuuaaaucauaacuu

SEQ ID NO: 13715 - RNA, 20 nt, Artificial Sequence
  targeting sequence with GTCN PAM
uaaacuagauguaguucaag

SEQ ID NO: 13716 - RNA, 20 nt, Artificial Sequence
  targeting sequence with GTCN PAM
ucaacuaucuaaauuccauu

SEQ ID NO: 13717 - RNA, 20 nt, Artificial Sequence
  targeting sequence with GTCN PAM
agcuugucaucaacuaucua

SEQ ID NO: 13718 - RNA, 20 nt, Artificial Sequence
  targeting sequence with GTCN PAM
aacaaugggucuagcuuguc

SEQ ID NO: 13719 - RNA, 20 nt, Artificial Sequence
  targeting sequence with GTCN PAM
aaaaauaaaauauaugcagu

SEQ ID NO: 13720 - RNA, 20 nt, Artificial Sequence
  targeting sequence with GTCN PAM
auauaaauaaggacauacuu

SEQ ID NO: 13721 - RNA, 20 nt, Artificial Sequence
  targeting sequence with GTCN PAM
uuauuuauauggacauuuaa

SEQ ID NO: 13722 - RNA, 20 nt, Artificial Sequence
  targeting sequence with GTCN PAM
aaaaagaaaaaauauuuagc

SEQ ID NO: 13723 - RNA, 20 nt, Artificial Sequence
  targeting sequence with GTCN PAM
uuucacaggaaugauuaagg

SEQ ID NO: 13724 - RNA, 20 nt, Artificial Sequence
  targeting sequence with GTCN PAM
ucacaccuugaagcaguaag

SEQ ID NO: 13725 - RNA, 20 nt, Artificial Sequence
  targeting sequence with GTCN PAM
uaggaaguuauauccaggca

SEQ ID NO: 13726 - RNA, 20 nt, Artificial Sequence
  targeting sequence with GTCN PAM
gaagaaaauaaagcccugaa

SEQ ID NO: 13727 - RNA, 20 nt, Artificial Sequence
  targeting sequence with GTCN PAM
auuuggauuuaucgauucau

SEQ ID NO: 13728 - RNA, 20 nt, Artificial Sequence
  targeting sequence with GTCN PAM
aaaugaaauggaaagaaauu

SEQ ID NO: 13729 - RNA, 20 nt, Artificial Sequence
  targeting sequence with GTCN PAM
accuucagagugcucuacaa

SEQ ID NO: 13730 - RNA, 20 nt, Artificial Sequence
  targeting sequence with GTCN PAM
guuucgaucuuuugccccgg

SEQ ID NO: 13731 - RNA, 20 nt, Artificial Sequence
  targeting sequence with GTCN PAM
ucaaagcaacagcaccagcc

SEQ ID NO: 13732 - RNA, 20 nt, Artificial Sequence
  targeting sequence with GTCN PAM
ucaaaaucuccaucccuguc

SEQ ID NO: 13733 - RNA, 20 nt, Artificial Sequence
  targeting sequence with GTCN PAM
gaaucaaguucucaguccuc

SEQ ID NO: 13734 - RNA, 20 nt, Artificial Sequence
  targeting sequence with GTCN PAM
uucucauucucuuaaacuua

SEQ ID NO: 13735 - RNA, 20 nt, Artificial Sequence
  targeting sequence with GTCN PAM
uaauauucuuucccucuuua

SEQ ID NO: 13736 - RNA, 20 nt, Artificial Sequence
  targeting sequence with GTCN PAM
uaucuauaauauuguuuaau

SEQ ID NO: 13737 - RNA, 20 nt, Artificial Sequence
  targeting sequence with GTCN PAM
caacugaaucacaacuagag

SEQ ID NO: 13738 - RNA, 20 nt, Artificial Sequence
  targeting sequence with GTCN PAM
gaucugggacaaguaacuuc

SEQ ID NO: 13739 - RNA, 20 nt, Artificial Sequence
  targeting sequence with GTCN PAM
cagcuacucaggaggcugag

SEQ ID NO: 13740 - RNA, 20 nt, Artificial Sequence
  targeting sequence with GTCN PAM
aauacguuacauacgagagc

SEQ ID NO: 13741 - RNA, 20 nt, Artificial Sequence
  targeting sequence with GTCN PAM
uuagcucaguggugccuacu

SEQ ID NO: 13742 - RNA, 20 nt, Artificial Sequence
  targeting sequence with GTCN PAM
uaucugaaucucuuuuaugc

SEQ ID NO: 13743 - RNA, 20 nt, Artificial Sequence
  targeting sequence with GTCN PAM
gauuucuuauuccuuauaac

SEQ ID NO: 13744 - RNA, 20 nt, Artificial Sequence
  targeting sequence with GTCN PAM
cacauuuauccugaauuuau

SEQ ID NO: 13745 - RNA, 20 nt, Artificial Sequence
  targeting sequence with GTCN PAM
cacaaagucuuacauuugga

SEQ ID NO: 13746 - RNA, 20 nt, Artificial Sequence
  targeting sequence with GTCN PAM
uacauuuggaauuaaagaaa

SEQ ID NO: 13747 - RNA, 20 nt, Artificial Sequence
  targeting sequence with GTCN PAM
agaaagcaagcuaauguaaa

SEQ ID NO: 13748 - RNA, 20 nt, Artificial Sequence
  targeting sequence with GTCN PAM
uacgcagcuuuguacaccug

SEQ ID NO: 13749 - RNA, 20 nt, Artificial Sequence
  targeting sequence with GTCN PAM
aggacgcagcagugaacaaa

SEQ ID NO: 13750 - RNA, 20 nt, Artificial Sequence
  targeting sequence with GTCN PAM
ucgacaccuaaaacagugcc

SEQ ID NO: 13751 - RNA, 20 nt, Artificial Sequence
  targeting sequence with GTCN PAM
acuaggcaccccaauccuaa

SEQ ID NO: 13752 - RNA, 20 nt, Artificial Sequence
  targeting sequence with GTCN PAM
gaacucguuuccagcuuuuc

SEQ ID NO: 13753 - RNA, 20 nt, Artificial Sequence
  targeting sequence with GTCN PAM
cacugccagaagucuucacu

SEQ ID NO: 13754 - RNA, 20 nt, Artificial Sequence
  targeting sequence with GTCN PAM
ucacuguaaggauuuguuca

SEQ ID NO: 13755 - RNA, 20 nt, Artificial Sequence
  targeting sequence with GTCN PAM
gcugcaaaaagugguuucuu

SEQ ID NO: 13756 - RNA, 20 nt, Artificial Sequence
  targeting sequence with GTCN PAM
gguggaaaauagccaagcag

SEQ ID NO: 13757 - RNA, 20 nt, Artificial Sequence
  targeting sequence with GTCN PAM
agcggugguuaaguauugua

SEQ ID NO: 13758 - RNA, 20 nt, Artificial Sequence
  targeting sequence with GTCN PAM
uuauucuacauuuguuuacc

SEQ ID NO: 13759 - RNA, 20 nt, Artificial Sequence
  targeting sequence with GTCN PAM
uauuauuuucauaaagcagu

SEQ ID NO: 13760 - RNA, 20 nt, Artificial Sequence
  targeting sequence with GTCN PAM
agguagguuuacauuaagaa

SEQ ID NO: 13761 - RNA, 20 nt, Artificial Sequence
  targeting sequence with GTCN PAM
accaaagauaccuucacugu

SEQ ID NO: 13762 - RNA, 20 nt, Artificial Sequence
  targeting sequence with GTCN PAM
augaaaugaggcaccaugag

SEQ ID NO: 13763 - RNA, 20 nt, Artificial Sequence
  targeting sequence with GTCN PAM
agucagauggacagcaccac

SEQ ID NO: 13764 - RNA, 20 nt, Artificial Sequence
  targeting sequence with GTCN PAM
gauggacagcaccacugaua

SEQ ID NO: 13765 - RNA, 20 nt, Artificial Sequence
  targeting sequence with GTCN PAM
aucugacuugacuuauucgu

SEQ ID NO: 13766 - RNA, 20 nt, Artificial Sequence
  targeting sequence with GTCN PAM
agccuaagcaacauacaucu

SEQ ID NO: 13767 - RNA, 20 nt, Artificial Sequence
  targeting sequence with GTCN PAM
gacuuuaucuuauaacuaaa

SEQ ID NO: 13768 - RNA, 20 nt, Artificial Sequence
  targeting sequence with GTCN PAM
gacucacucauuucauucuu

SEQ ID NO: 13769 - RNA, 20 nt, Artificial Sequence
  targeting sequence with GTCN PAM
gauuucauguguucacagaa

SEQ ID NO: 13770 - RNA, 20 nt, Artificial Sequence
  targeting sequence with GTCN PAM
ucuaauucucaggcaguuca

SEQ ID NO: 13771 - RNA, 20 nt, Artificial Sequence
  targeting sequence with GTCN PAM
uacuuacugauuugcauuug

SEQ ID NO: 13772 - RNA, 20 nt, Artificial Sequence
  targeting sequence with GTCN PAM
augggcaagaacuagaacuu

SEQ ID NO: 13773 - RNA, 20 nt, Artificial Sequence
  targeting sequence with GTCN PAM
gaauuucaaguucuaguucu

SEQ ID NO: 13774 - RNA, 20 nt, Artificial Sequence
  targeting sequence with GTCN PAM
aauuugaaccagaacauugu

SEQ ID NO: 13775 - RNA, 20 nt, Artificial Sequence
  targeting sequence with GTCN PAM
accaaauaugaaaugauucc

SEQ ID NO: 13776 - RNA, 20 nt, Artificial Sequence
  targeting sequence with GTCN PAM
gagaaagcugaguuuauugg

SEQ ID NO: 13777 - RNA, 20 nt, Artificial Sequence
  targeting sequence with GTCN PAM
uuucuuccauucuucuuuuu

SEQ ID NO: 13778 - RNA, 20 nt, Artificial Sequence
  targeting sequence with GTCN PAM
uucucuacucuagaauggcu

SEQ ID NO: 13779 - RNA, 20 nt, Artificial Sequence
  targeting sequence with GTCN PAM
uucucagagcacucgccagu

SEQ ID NO: 13780 - RNA, 20 nt, Artificial Sequence
  targeting sequence with GTCN PAM
caaucacauugcuguuuuuu

SEQ ID NO: 13781 - RNA, 20 nt, Artificial Sequence
  targeting sequence with GTCN PAM
guuuaaaguuuucacacaaa

SEQ ID NO: 13782 - RNA, 20 nt, Artificial Sequence
  targeting sequence with GTCN PAM
cuaaaauauuauucaaauaa

SEQ ID NO: 13783 - RNA, 20 nt, Artificial Sequence
  targeting sequence with GTCN PAM
cuaaucauaugcaagcauaa

SEQ ID NO: 13784 - RNA, 20 nt, Artificial Sequence
  targeting sequence with GTCN PAM
aacucagggcauuaauaggg

SEQ ID NO: 13785 - RNA, 20 nt, Artificial Sequence
  targeting sequence with GTCN PAM
ucuuguuuuaguuuuuauuu

SEQ ID NO: 13786 - RNA, 20 nt, Artificial Sequence
  targeting sequence with GTCN PAM
cuauccuucuaccuggugga

SEQ ID NO: 13787 - RNA, 20 nt, Artificial Sequence
  targeting sequence with GTCN PAM
uggugaugaccuacacacag

SEQ ID NO: 13788 - RNA, 20 nt, Artificial Sequence
  targeting sequence with GTCN PAM
ucaccaggaccacccgagua

SEQ ID NO: 13789 - RNA, 20 nt, Artificial Sequence
  targeting sequence with GTCN PAM
ccuuauagguaagugaucag

SEQ ID NO: 13790 - RNA, 20 nt, Artificial Sequence
  targeting sequence with GTCN PAM
cagcauguguuagagugggg

SEQ ID NO: 13791 - RNA, 20 nt, Artificial Sequence
  targeting sequence with GTCN PAM
uucucuaucaggguuucuca

SEQ ID NO: 13792 - RNA, 20 nt, Artificial Sequence
  targeting sequence with GTCN PAM
agguugagaaacccugauag

SEQ ID NO: 13793 - RNA, 20 nt, Artificial Sequence
  targeting sequence with GTCN PAM
cuagaguccagguugagaaa

SEQ ID NO: 13794 - RNA, 20 nt, Artificial Sequence
  targeting sequence with GTCN PAM
agaaugucacuagaguccag

SEQ ID NO: 13795 - RNA, 20 nt, Artificial Sequence
  targeting sequence with GTCN PAM
cauguaaguguuaacauaua

SEQ ID NO: 13796 - RNA, 20 nt, Artificial Sequence
  targeting sequence with GTCN PAM
uuauaaaaaaaauucaagua

SEQ ID NO: 13797 - RNA, 20 nt, Artificial Sequence
  targeting sequence with GTCN PAM
caauuagggaaauaccguac

SEQ ID NO: 13798 - RNA, 20 nt, Artificial Sequence
  targeting sequence with GTCN PAM
ugcuggaaauaaaagagaua

SEQ ID NO: 13799 - RNA, 20 nt, Artificial Sequence
  targeting sequence with GTCN PAM
auuagaagccugcuguguaa

SEQ ID NO: 13800 - RNA, 20 nt, Artificial Sequence
  targeting sequence with GTCN PAM
uuguccauuagaagccugcu

SEQ ID NO: 13801 - RNA, 20 nt, Artificial Sequence
  targeting sequence with GTCN PAM
ugcuguggccuuuaauaaca

SEQ ID NO: 13802 - RNA, 20 nt, Artificial Sequence
  targeting sequence with GTCN PAM
uugacauuuaguuguaauca

SEQ ID NO: 13803 - RNA, 20 nt, Artificial Sequence
  targeting sequence with GTCN PAM
aggacuaauuguaauuucca

SEQ ID NO: 13804 - RNA, 20 nt, Artificial Sequence
  targeting sequence with GTCN PAM
ugaauaaugauuacaacuaa

SEQ ID NO: 13805 - RNA, 20 nt, Artificial Sequence
  targeting sequence with GTCN PAM
ugccaaggaucacagcuuau

SEQ ID NO: 13806 - RNA, 20 nt, Artificial Sequence
  targeting sequence with GTCN PAM
acaccucuucaguucaauau

SEQ ID NO: 13807 - RNA, 20 nt, Artificial Sequence
  targeting sequence with GTCN PAM
uuucaaucgaugaucacaaa

SEQ ID NO: 13808 - RNA, 20 nt, Artificial Sequence
  targeting sequence with GTCN PAM
guuuugcaaagugccacgcu

SEQ ID NO: 13809 - RNA, 20 nt, Artificial Sequence
  targeting sequence with GTCN PAM
gaacaaucugacuucuagau

SEQ ID NO: 13810 - RNA, 20 nt, Artificial Sequence
  targeting sequence with GTCN PAM
gauuguucugacauauaauu

SEQ ID NO: 13811 - RNA, 20 nt, Artificial Sequence
  targeting sequence with GTCN PAM
uuuuaaaauuucuuaguaca

SEQ ID NO: 13812 - RNA, 20 nt, Artificial Sequence
  targeting sequence with GTCN PAM
uaugaaaucacuaugaaugg

SEQ ID NO: 13813 - RNA, 20 nt, Artificial Sequence
  targeting sequence with GTCN PAM
uuuuguaaaccauucaaaac

SEQ ID NO: 13814 - RNA, 20 nt, Artificial Sequence
  targeting sequence with GTCN PAM
uauuccacagauguguuuug

SEQ ID NO: 13815 - RNA, 20 nt, Artificial Sequence
  targeting sequence with GTCN PAM
aaauaccacucaaagcuaaa

SEQ ID NO: 13816 - RNA, 20 nt, Artificial Sequence
  targeting sequence with GTCN PAM
uguaacuggccaggauguuu

SEQ ID NO: 13817 - RNA, 20 nt, Artificial Sequence
  targeting sequence with GTCN PAM
agccacuuaagccuccaggc

SEQ ID NO: 13818 - RNA, 20 nt, Artificial Sequence
  targeting sequence with GTCN PAM
ucggcuugcagcugcugugg

SEQ ID NO: 13819 - RNA, 20 nt, Artificial Sequence
  targeting sequence with GTCN PAM
ugaauaaugcucuuggcgaa

SEQ ID NO: 13820 - RNA, 20 nt, Artificial Sequence
  targeting sequence with GTCN PAM
ugcuuuugauagguuuguuu

SEQ ID NO: 13821 - RNA, 20 nt, Artificial Sequence
  targeting sequence with GTCN PAM
gcuccaugaaauuacucgcu

SEQ ID NO: 13822 - RNA, 20 nt, Artificial Sequence
  targeting sequence with GTCN PAM
ucucagcuuaauaaucccca

SEQ ID NO: 13823 - RNA, 20 nt, Artificial Sequence
  targeting sequence with GTCN PAM
aucagguuuacuguuacaca

SEQ ID NO: 13824 - RNA, 20 nt, Artificial Sequence
  targeting sequence with GTCN PAM
auauaaagaguaaaauaaua

SEQ ID NO: 13825 - RNA, 20 nt, Artificial Sequence
  targeting sequence with GTCN PAM
ucaacuucuuauucugcaug

SEQ ID NO: 13826 - RNA, 20 nt, Artificial Sequence
  targeting sequence with GTCN PAM
cuucacauccacuccuguuu

SEQ ID NO: 13827 - RNA, 20 nt, Artificial Sequence
  targeting sequence with GTCN PAM
guuuuuugcugauguacccc

SEQ ID NO: 13828 - RNA, 20 nt, Artificial Sequence
  targeting sequence with GTCN PAM
uguugacacaaaauaaacug

SEQ ID NO: 13829 - RNA, 20 nt, Artificial Sequence
  targeting sequence with GTCN PAM
acaugacuuagcagccugug

SEQ ID NO: 13830 - RNA, 20 nt, Artificial Sequence
  targeting sequence with GTCN PAM
uauaaucauagaaagcaaua

SEQ ID NO: 13831 - RNA, 20 nt, Artificial Sequence
  targeting sequence with GTCN PAM
ugaucauaucauugguaucc

SEQ ID NO: 13832 - RNA, 20 nt, Artificial Sequence
  targeting sequence with GTCN PAM
aaauauuaaagaaaauauuc

SEQ ID NO: 13833 - RNA, 20 nt, Artificial Sequence
  targeting sequence with GTCN PAM
guaauaauaaaaauagaauu

SEQ ID NO: 13834 - RNA, 20 nt, Artificial Sequence
  targeting sequence with GTCN PAM
uauaccaguuucagaaauaa

SEQ ID NO: 13835 - RNA, 20 nt, Artificial Sequence
  targeting sequence with GTCN PAM
uaguacagaucuaaaaaguc

SEQ ID NO: 13836 - RNA, 20 nt, Artificial Sequence
  targeting sequence with GTCN PAM
uguuuaaacugaaauucuua

SEQ ID NO: 13837 - RNA, 20 nt, Artificial Sequence
  targeting sequence with GTCN PAM
uuguagagaaacaucucacu

SEQ ID NO: 13838 - RNA, 20 nt, Artificial Sequence
  targeting sequence with GTCN PAM
uagaaucuaggaaauacagu

SEQ ID NO: 13839 - RNA, 20 nt, Artificial Sequence
  targeting sequence with GTCN PAM
auuucagauauguuaaaaua

SEQ ID NO: 13840 - RNA, 20 nt, Artificial Sequence
  targeting sequence with GTCN PAM
aaagugucaauuucagauau

SEQ ID NO: 13841 - RNA, 20 nt, Artificial Sequence
  targeting sequence with GTCN PAM
aaagaaacucaccagccacu

SEQ ID NO: 13842 - RNA, 20 nt, Artificial Sequence
  targeting sequence with GTCN PAM
cacacuaaagcauuuuccga

SEQ ID NO: 13843 - RNA, 20 nt, Artificial Sequence
  targeting sequence with GTCN PAM
ggagaagcuggcaugacaga

SEQ ID NO: 13844 - RNA, 20 nt, Artificial Sequence
  targeting sequence with GTCN PAM
ugccagcuucuccugacuuc

SEQ ID NO: 13845 - RNA, 20 nt, Artificial Sequence
  targeting sequence with GTCN PAM
gucaugccagcuucuccuga

SEQ ID NO: 13846 - RNA, 20 nt, Artificial Sequence
  targeting sequence with GTCN PAM
cucuguccuaagcugcaccu

SEQ ID NO: 13847 - RNA, 20 nt, Artificial Sequence
  targeting sequence with GTCN PAM
uaagcugcaccuuauuucaa

SEQ ID NO: 13848 - RNA, 20 nt, Artificial Sequence
  targeting sequence with GTCN PAM
acuacuugugagacuagcua

SEQ ID NO: 13849 - RNA, 20 nt, Artificial Sequence
  targeting sequence with GTCN PAM
cacaaguaguugaccuuuaa

SEQ ID NO: 13850 - RNA, 20 nt, Artificial Sequence
  targeting sequence with GTCN PAM
agcuagucucacaaguaguu

SEQ ID NO: 13851 - RNA, 20 nt, Artificial Sequence
  targeting sequence with GTCN PAM
uuuugcaacuuuuauagugu

SEQ ID NO: 13852 - RNA, 20 nt, Artificial Sequence
  targeting sequence with GTCN PAM
caauuuuguaauccuuuugg

SEQ ID NO: 13853 - RNA, 20 nt, Artificial Sequence
  targeting sequence with GTCN PAM
auuaugguaacaauauuuuu

SEQ ID NO: 13854 - RNA, 20 nt, Artificial Sequence
  targeting sequence with GTCN PAM
auaaaacuaaaauuuaagaa

SEQ ID NO: 13855 - RNA, 20 nt, Artificial Sequence
  targeting sequence with GTCN PAM
uagauaagaugaaauaaaca

SEQ ID NO: 13856 - RNA, 20 nt, Artificial Sequence
  targeting sequence with GTCN PAM
ccacgucauagauaagauga

SEQ ID NO: 13857 - RNA, 20 nt, Artificial Sequence
  targeting sequence with GTCN PAM
cagaguggagauuucauaag

SEQ ID NO: 13858 - RNA, 20 nt, Artificial Sequence
  targeting sequence with GTCN PAM
uacuuaugaaaucuccacuc

SEQ ID NO: 13859 - RNA, 20 nt, Artificial Sequence
  targeting sequence with GTCN PAM
aaauuggacucaacauuaga

SEQ ID NO: 13860 - RNA, 20 nt, Artificial Sequence
  targeting sequence with GTCN PAM
aauuuagacaucccaucagg

SEQ ID NO: 13861 - RNA, 20 nt, Artificial Sequence
  targeting sequence with GTCN PAM
guugguuuagccugcaaacc

SEQ ID NO: 13862 - DNA, 14 bp, Artificial Sequence
  sgNA variant
attatctcattact

SEQ ID NO: 13863 - protein, 85 aa, Unknown
  chloroplast transit peptide
MASSMLSSATMVASPAQATMVAPFNGLKSSAAFPATRKANNDITSITSNGGRVNCMQVWPPIEKKKFETLSYLPDLTDSGGRVNC

SEQ ID NO: 13864 - protein, 65 aa, Unknown
  chloroplast transit peptide
MESLAATSVFAPSRVAVPAARALVRAGTVVPTRRTSSTSGTSGVKCSAAVTPQASPVISRSAAAA

What is claimed is:

1. A system comprising a Class 2 Type V CRISPR protein and a first guide nucleic acid (gNA), wherein the gNA comprises a targeting sequence complementary to a proprotein convertase subtilisin/kexin Type 9 (PCSK9) gene target nucleic acid sequence, wherein the PCSK9 gene comprises one or more mutations.

2. The system of claim 1, wherein the PCSK9 gene comprises one or more mutations in a region selected from the group consisting of:
a. a PCSK9 intron;
b. a PCSK9 exon;
c. a PCSK9 intron-exon junction;
d. a PCSK9 regulatory element; and
e. an intergenic region.

3. The system of any one of claim 1 or claim 2, wherein the mutation is an insertion, deletion, substitution, duplication, or inversion of one or more nucleotides as compared to the wild-type PCSK9 gene sequence.

4. The system of any one of claims 1-3, wherein the mutation is a gain of function mutation.

5. The system of claim 3, wherein the one or more mutations comprise amino acid substitutions selected from the group consisting of S127R, D129G, F216L, D374H, and D374Y relative to the sequence of SEQ ID NO: 33.

6. The system of claims 1-5, wherein the targeting sequence of the gNA is complementary to a target nucleic acid sequence encoding the S127R, D129G, F216L, D374H, or D374Y substitution.

7. The system of claim 6, wherein the targeting sequence of the gNA comprises a sequence of selected from the group consisting of AGCAGGUCGCCUCUCAUCUU (SEQ ID NO: 272), CAUCUUCACCAGGAAGCCAG (SEQ ID NO: 273), CCUCUCAUCUUCACCAGGAA (SEQ ID NO: 274), UGGUGAAGAUGAGAGGCGAC (SEQ ID NO: 275), GUGGAGGCGGGUCCCGUCCU (SEQ ID NO: 281), AGCCACUGCAGCACCUGCUU (SEQ ID NO: 287), UUGGUGCCUCCAGCCACUGC (SEQ ID NO: 288), AGCUACUGCAGCACCUGCUU (SEQ ID NO: 289), and UUGGUGCCUCCAGCUACUGC (SEQ ID NO:290).

8. The system of any one of claims 1-3, wherein the mutation is a loss of function mutation.

9. The system of claim 8, wherein the one or more mutations comprise amino acid substitutions selected from the group consisting of R46L, G106R, Y142X, N157K, R237W and C679X relative to the sequence of SEQ ID NO: 33.

10. The system of claim 9, wherein the targeting sequence of the gNA is complementary to a target nucleic acid sequence encoding the R46L, G106R, Y142X, N157K, R237W or C679X substitution.

11. The system of any one of claims 1-10, wherein the PCSK9 gene encodes a non-functional PCSK9 protein.

12. The system of any one of claims 1-11, wherein the gNA is a guide RNA (gRNA).

13. The system of any one of claims 1-11, wherein the gNA is a guide DNA (gDNA).

14. The system of any one of claims 1-11, wherein the gNA is a chimera comprising DNA and RNA.

15. The system of any one of claims 1-14, wherein the gNA is a single-molecule gNA (sgNA).

16. The system of any one of claims 1-14, wherein the gNA is a dual-molecule gNA (dgNA).

17. The system of any one of claims 1-16, wherein the targeting sequence of the gNA comprises a sequence selected from the group consisting of the sequences of SEQ ID NOS: 247-303, 315-436, 612-2100, and 2286-13861, or a sequence having at least about 65%, at least about 75%, at least about 85%, or at least about 95% identity thereto.

18. The system of any one of claims 1-16, wherein the targeting sequence of the gNA comprises a sequence selected from the group consisting of the sequences of SEQ ID NOs: 247-303, 315-436, 612-2100, and 2286-13861.

19. The system of any one of claims 1-16, wherein the targeting sequence of the gNA comprises a sequence of SEQ ID NOs: 247-303, 315-436, 612-2100, or 2286-13861 with a single nucleotide removed from the 3′ end of the sequence.

20. The system of any one of claims 1-16, wherein the targeting sequence of the gNA comprises a sequence of SEQ ID NOs: 247-303, 315-436, 612-2100, or 2286-13861 with two nucleotides removed from the 3′ end of the sequence.

21. The system of any one of claims 1-16, wherein the targeting sequence of the gNA comprises a sequence of SEQ ID NOs: 247-303, 315-436, 612-2100, or 2286-13861 with three nucleotides removed from the 3′ end of the sequence.

22. The system of any one of claims 1-16, wherein the targeting sequence of the gNA comprises a sequence of SEQ ID NOs: 247-303, 315-436, 612-2100, or 2286-13861 with four nucleotides removed from the 3′ end of the sequence.

23. The system of any one of claims 1-16, wherein the targeting sequence of the gNA comprises a sequence of SEQ ID NOs: 247-303, 315-436, 612-2100, or 2286-13861 with five nucleotides removed from the 3′ end of the sequence.

24. The system of any one of claims 17-23, wherein the targeting sequence of the gNA comprises a sequence having one or more single nucleotide polymorphisms (SNP) relative to a sequence of SEQ ID NOS: 247-303, 315-436, 612-2100, or 2286-13861.

25. The system of any one of claims 1-24, wherein the targeting sequence of the gNA is complementary to a sequence of a PCSK9 exon.

26. The system of any one of claims 1-24, wherein the targeting sequence of the gNA is complementary to a sequence of PCSK9 exon 1 or exon 2.

27. The system of any one of claims 1-24, wherein the targeting sequence of the gNA is complementary to a sequence of a PCSK9 intron.

28. The system of any one of claims 1-24, wherein the targeting sequence of the gNA is complementary to a sequence of a PCSK9 intron-exon junction.

29. The system of any one of claims 1-24, wherein the targeting sequence of the gNA is complementary to a sequence of a PCSK9 regulatory element.

30. The system of any one of claims 1-23, wherein the targeting sequence of the gNA is complementary to a sequence comprising one or more single nucleotide polymorphisms (SNPs) of the PCSK9 gene.

31. The system of any one of claims 1-24, wherein the targeting sequence of the gNA is complementary to a sequence of an intergenic region of the PCSK9 gene.

32. The system of any one of claims 1-31, further comprising a second gNA, wherein the second gNA has a targeting sequence complementary to a different or overlapping portion of the PCSK9 target nucleic acid compared to the targeting sequence of the first gNA.

33. The system of claim 32, wherein the second gNA has a targeting sequence complementary to the same exon targeted by the first gNA.

34. The system of claim 32, wherein the second gNA has a targeting sequence complementary to a different exon targeted by the first gNA.

35. The system of claim 32, wherein the second gNA has a targeting sequence complementary to an intron 3′ to the exon targeted by the first gNA.

36. The system of any one of claims 32-35, wherein the targeting sequence of the second gNA comprises a sequence selected from the group consisting of the sequences of SEQ ID NOS: 247-303, 315-436, 612-2100, and 2286-13861, or a sequence having at least about 65%, at least about 75%, at least about 85%, or at least about 95% identity thereto.

37. The system of any one of claims 32-35, wherein the targeting sequence of the second gNA comprises a sequence selected from the group consisting of the sequences of SEQ ID NOs: 247-303, 315-436, 612-2100, and 2286-13861.

38. The system of any one of claims 32-35, wherein the targeting sequence of the second gNA comprises a sequence of SEQ ID NOs: 247-303, 315-436, 612-2100, or 2286-13861 with a single nucleotide removed from the 3′ end of the sequence.

39. The system of any one of claims 32-35, wherein the targeting sequence of the second gNA comprises a sequence of SEQ ID NOs: 247-303, 315-436, 612-2100, or 2286-13861 with two nucleotides removed from the 3′ end of the sequence.

40. The system of any one of claims 32-35, wherein the targeting sequence of the second gNA comprises a sequence of SEQ ID NOs: 247-303, 315-436, 612-2100, or 2286-13861 with three nucleotides removed from the 3′ end of the sequence.

41. The system of any one of claims 32-35, wherein the targeting sequence of the second gNA comprises a sequence of SEQ ID NOs: 247-303, 315-436, 612-2100, or 2286-13861 with four nucleotides removed from the 3′ end of the sequence.

42. The system of any one of claims 32-35, wherein the targeting sequence of the second gNA comprises a sequence of SEQ ID NOs: 247-303, 315-436, 612-2100, or 2286-13861 with five nucleotides removed from the 3′ end of the sequence.

43. The system of any one of claims 1-42, wherein the first and/or second gNA has a scaffold comprising a sequence selected from the group consisting of SEQ ID NOS: 2201-2285, or a sequence having at least about 50%, at least about 60%, at least about 70%, at least about 80%, at least about 90%, at least about 95%, at least about 96%, at least about 97%, at least about 98%, at least about 99% sequence identity thereto.

44. The system of any one of claims 1-42, wherein the first and/or second gNA has a scaffold comprising a sequence selected from the group consisting of SEQ ID NOS: 2201-2285.

45. The system of any one of claims 1-42, wherein the first and/or second gNA has a scaffold consisting of a sequence selected from the group consisting of SEQ ID NOS: 2201-2285.

46. The system of any one of claims 1-45, wherein the first and/or second gNA scaffold comprises a sequence having at least one modification relative to a reference gNA sequence selected from the group consisting of SEQ ID NOS: 4-16.

47. The system of claim 46, wherein the at least one modification of the reference gNA comprises at least one substitution, deletion, or substitution of a nucleotide of the reference gNA sequence.

48. The system of any one of claims 1-47, wherein the first and/or second gNA is chemically modified.

49. The system of any one of claims 1-48, wherein the Class 2 Type V CRISPR protein is a reference CasX protein having a sequence of any one of SEQ ID NOS: 1-3, a CasX variant protein having a sequence of SEQ ID NOS: 49-160, 329, 441, 443, 445, 447-460, 472, 474, 476, 478, 480, 482, 484, 486, 488, or 490, or a sequence having at least about 50%, at least about 60%, at least about 70%, at least about 80%, at least about 90%, or at least about 95%, or at least about 95%, or at least about 96%, or at least about 97%, or at least about 98%, or at least about 99% sequence identity thereto.

50. The system of any one of claims 1-49, wherein the Class 2 Type V CRISPR protein is a CasX variant protein having a sequence of SEQ ID NOS: 49-160, 329, 441, 443, 445, 447-460, 472, 474, 476, 478, 480, 482, 484, 486, 488, or 490.

51. The system of 49, wherein the CasX variant protein comprises at least one modification relative to a reference CasX protein having a sequence selected from SEQ ID NOS:1-3.

52. The system of claim 51, wherein the at least one modification comprises at least one amino acid substitution, deletion, or substitution in a domain of the CasX variant protein relative to the reference CasX protein.

53. The system of claim 52, wherein the domain is selected from the group consisting of a non-target strand binding (NTSB) domain, a target strand loading (TSL) domain, a helical I domain, a helical II domain, an oligonucleotide binding domain (OBD), and a RuvC DNA cleavage domain.

54. The system of any one of claims 49-53, wherein the CasX protein further comprises one or more nuclear localization signals (NLS).

55. The system of claim 54, wherein the one or more NLS are selected from the group of sequences consisting of SEQ ID NOS: 161-194, 217 and 223-224.

56. The system of claim 54 or claim 55, wherein the one or more NLS are expressed at or near the C-terminus of the CasX protein.

57. The system of claim 54 or claim 55, wherein the one or more NLS are expressed at or near the N-terminus of the CasX protein.

58. The system of claim 54 or claim 55, comprising one or more NLS located at or near the N-terminus and at or near the C-terminus of the CasX protein.

59. The system of any one of claims 49-58, wherein the Class 2 Type V CRISPR protein is capable of forming a ribonuclear protein complex (RNP) with the gNA.

60. The system of any one of claims 49-58, wherein the CasX variant is capable of forming a ribonuclear protein complex (RNP) with the gNA.

61. The system of any one of claims 49-58, wherein the CasX variant and the gNA are complexed as an RNP.

62. The system of claim 61, wherein an RNP comprising the CasX variant protein and the gNA exhibit at least one or more improved characteristics as compared to an RNP comprising the reference CasX protein of SEQ ID NO: 1, SEQ ID NO: 2, or SEQ ID NO: 3 and a gNA comprising a sequence of any one of SEQ ID NOS: 4-16.

63. The system of claim 62, wherein the improved characteristic is selected from one or more of the group consisting of improved folding of the CasX variant; improved binding affinity to a guide nucleic acid (gNA); improved binding affinity to a target DNA; improved ability to utilize a greater spectrum of one or more PAM sequences, including ATC, CTC, GTC, or TTC, in the editing of target DNA; improved unwinding of the target DNA; increased editing activity; improved editing efficiency; improved editing specificity; increased nuclease activity; improved target nucleic acid sequence cleavage rate; increased target strand loading for double strand cleavage; decreased target strand loading for single strand nicking; decreased off-target cleavage; improved binding of non-target DNA strand; improved protein stability; improved protein solubility; improved ribonuclear protein complex (RNP) formation; higher percentage of cleavage-competent RNP; improved protein:gNA complex (RNP) stability; improved protein:gNA complex solubility; improved protein yield; improved protein expression; and improved fusion characteristics.

64. The system of claim 62 or claim 63, wherein the improved characteristic of the RNP of the CasX variant protein and the gNA variant is at least about 1.1 to about 100-fold or more improved relative to the RNP of the reference CasX protein of SEQ ID NO: 1, SEQ ID NO: 2, or SEQ ID NO: 3 and the gNA comprising a sequence of any one of SEQ ID NOS: 4-16.

65. The system of claim 62 or claim 63, wherein the improved characteristic of the CasX variant protein is at least about 1.1, at least about 2, at least about 10, at least about 100-fold or more improved relative to the reference CasX protein of SEQ ID NO: 1, SEQ ID NO: 2, or SEQ ID NO: 3 and the gNA comprising a sequence of any one of SEQ ID NOS: 4-16.

66. The system of claim 64 or claim 65, wherein the improved characteristic is improved binding affinity to the target nucleic acid sequence.

67. The system of any one of claims 61-66, wherein the RNP comprising the CasX variant and the gNA variant exhibits greater editing efficiency and/or binding of a target sequence in the target nucleic acid when any one of the PAM sequences TTC, ATC, GTC, or CTC is located 1 nucleotide 5′ to the non-target strand sequence having identity with the targeting sequence of the gNA in a cellular assay system compared to the editing efficiency and/or binding of an RNP comprising a reference CasX protein and a reference gNA in a comparable assay system.

68. The system of claim 67, wherein the PAM sequence is TTC.

69. The system of claim 68, wherein the targeting sequence of the gNA comprises a sequence selected from the group consisting of SEQ ID NOS: 3184-7251.

70. The system of claim 67, wherein the PAM sequence is ATC.

71. The system of claim 70, wherein the targeting sequence of the gNA comprises a sequence selected from the group consisting of SEQ ID NOs: 315-436, 612-2100 and 2286-3183.

72. The system of claim 67, wherein the PAM sequence is CTC.

73. The system of claim 72, wherein the targeting sequence of the gNA comprises a sequence selected from the group consisting of SEQ ID NOs: 7252-11521.

74. The system of claim 67, wherein the PAM sequence is GTC.

75. The system of claim 74, wherein the targeting sequence of the gNA comprises a sequence selected from the group consisting of SEQ ID NOs: 11522-13861.

76. The system of any one of claims 61-75, wherein the RNP has at least a 5%, at least a 10%, at least a 15%, or at least a 20% higher percentage of cleavage-competent RNP compared to an RNP of the reference CasX proteins of SEQ ID NOS: 1-3 and the gNA of SEQ ID NOS: 4-16.

77. The system of any one of claims 60-75, wherein the RNP has at least a 5-fold, at least a 10-fold, or at least a 30-fold increased cleavage rate in an in vitro assay compared to an RNP of the reference CasX proteins of SEQ ID NOS: 1-3.

78. The system of any one of claims 49-77, wherein the CasX variant protein comprises a RuvC DNA cleavage domain having nickase activity.

79. The system of any one of claims 49-77, wherein the CasX variant protein comprises a RuvC DNA cleavage domain having double-stranded cleavage activity.

80. The system of any one of claims 49-75, wherein the CasX protein is a catalytically inactive CasX (dCasX) protein, and wherein an RNP of the dCasX and the gNA retain the ability to bind to the PCSK9 target nucleic acid.

81. The system of claim 80, wherein the dCasX comprises a mutation at residues:
a. D672, E769, and/or D935 corresponding to the CasX protein of SEQ ID NO:1; or
b. D659, E756 and/or D922 corresponding to the CasX protein of SEQ ID NO: 2.

82. The system of claim 81, wherein the mutation is a substitution of alanine for the residue.

83. The system of any one of claims 1-79, further comprising a donor template nucleic acid.

84. The system of claim 83, wherein the donor template comprises a nucleic acid comprising at least a portion of a PCSK9 gene selected from the group consisting of a PCSK9 exon, a PCSK9 intron, a PCSK9 intron-exon junction, and a PCSK9 regulatory element, or a combination thereof.

85. The system of claim 84, wherein the donor template comprises a wild-type nucleic acid sequence.

86. The system of claim 84, wherein the donor template comprises a nucleic acid sequence having one or more mutations relative to the wild-type PCSK9 gene sequence.

87. The system of any one of claims 83-86, wherein the donor template ranges in size from 10-15,000 nucleotides.

88. The system of any one of claims 83-87, wherein the donor template is a single-stranded DNA template or a single stranded RNA template.

89. The system of any one of claims 83-87, wherein the donor template is a double-stranded DNA template.

90. The system of any one of claims 83-89, wherein the donor template comprises homologous arms at or near the 5′ and 3′ ends of the donor template that are complementary to sequences flanking cleavage sites in the PCSK9 target nucleic acid introduced by the Class 2 Type V CRISPR protein.

91. The system of any one of claims 1-90, wherein the target nucleic acid sequence is complementary to a non-target strand sequence located 1 nucleotide 3′ of a protospacer adjacent motif (PAM) sequence.

92. The system of claim 91, wherein the PAM sequence comprises a TC motif.

93. The system of claim 91, wherein the PAM sequence comprises ATC, GTC, CTC or TTC.

94. The system of any one of claims 91-93, wherein the Class 2 Type V CRISPR protein comprises a RuvC domain.

95. The system of claim 94, wherein the RuvC domain generates a staggered double-stranded break in the target nucleic acid sequence.

96. The system of any one of claims 91-95, wherein the Class 2 Type V CRISPR protein does not comprise an HNH nuclease domain.

97. A nucleic acid comprising the donor template of any one of claims 83-90.

98. A nucleic acid comprising a sequence that encodes the CasX of any one of claims 49-82.

99. The nucleic acid of claim 98, wherein the sequence that encodes the CasX protein is codon optimized for expression in a eukaryotic cell.

100. A nucleic acid comprising a sequence that encodes the gNA of any one of claims 1-48.

101. A vector comprising the gNA of any one of claims 1-48, the CasX protein of any one of claims 49-82, or the nucleic acid of any one of claims 97-100.

102. The vector of claim 101, wherein the vector further comprises a promoter.

103. The vector of claim 101 or claim 102, wherein the vector is selected from the group consisting of a retroviral vector, a lentiviral vector, an adenoviral vector, an adeno-associated viral (AAV) vector, a herpes simplex virus (HSV) vector, a virus-like particle (VLP), a plasmid, a minicircle, a nanoplasmid, a DNA vector, and an RNA vector.

104. The vector of claim 103, wherein the vector is an AAV vector.

105. The vector of claim 104, wherein the AAV vector is selected from AAV1, AAV2, AAV3, AAV4, AAV5, AAV6, AAV7, AAV8, AAV9, AAV10, AAV11, AAV12, AAV 44.9, AAV-Rh74, or AAVRh10.

106. The vector of claim 105, wherein the AAV vector is selected from AAV1, AAV2, AAV5, AAV8, or AAV9.

107. The vector of claim 103, wherein the vector is a retroviral vector.

108. The vector of claim 103, wherein the vector is a VLP vector comprising one or more components of a gag polyprotein.

109. The vector of claim 108, wherein the one or more components of the Gag polyprotein are selected from the group consisting of matrix protein (MA), nucleocapsid protein (NC), capsid protein (CA), p1-p6 protein, a PP21/24 peptide, a P12/P3/P8 peptide, a p2 peptide, a P10 peptide, a p68 Gag polypeptide, a p3 Gag polypeptide, and a protease cleavage site.

110. The vector of claim 108 or claim 109, comprising the CasX protein and the gNA.

111. The vector of claim 110, wherein the CasX protein and the gNA are associated together in an RNP.

112. The vector of any one of claims 108-111, further comprising the donor template.

113. The vector of any one of claims 108-112, further comprising a pseudotyping viral envelope glycoprotein or antibody fragment that provides for binding and fusion of the VLP to a target cell.

114. A host cell comprising the vector of any one of claims 101-113.

115. The host cell of claim 114, wherein the host cell is selected from the group consisting of BHK, HEK293, HEK293T, NS0, SP2/0, YO myeloma cells, P3X63 mouse myeloma cells, PER, PER.C6, NIH3T3, COS, HeLa, CHO, and yeast cells.

116. A pharmaceutical composition comprising:
a. the system of any one of claims 1-96;
b. the nucleic acid of any one of claims 97-100; or
c. the vector of any one of claims 101-113,
and one or more pharmaceutically suitable excipients.

117. The pharmaceutical composition of claim 116, wherein the pharmaceutical composition is formulated for a route of administration selected from the group consisting of intravenous, intraportal vein injection, intraperitoneal, intramuscular, subcutaneous, intraocular, and oral routes.

118. The pharmaceutical composition of claim 116, wherein the pharmaceutical composition is in a liquid form or a frozen form.

119. The pharmaceutical composition of any one of claims 116-118, wherein the pharmaceutical composition is in a pre-filled syringe for a single injection.

120. A method of modifying a PCSK9 target nucleic acid sequence in a population of cells, wherein the PCSK9 target nucleic acid comprises one or more mutations, the method comprising introducing into cells of the population:
a. the system of any one of claims 1-96;
b. the nucleic acid of any one of claims 97-100;
c. the vector of any one of claims 101-113;
d. the pharmaceutical composition of any one of claims 116-119; or
e. combinations of two or more of (a)-(d),
wherein the PCSK9 target nucleic acid sequence of the cells targeted by the first gNA is modified by the Class 2 Type V protein.

121. The method of claim 120, wherein the modifying comprises introducing a single-stranded break in the PCSK9 target nucleic acid sequence of the cells of the population.

122. The method of claim 120, wherein the modifying comprises introducing a double-stranded break in the PCSK9 target nucleic acid sequence of the cells of the population.

123. The method of any one of claims 120-122, further comprising introducing into the cells of the population a second gNA or a nucleic acid encoding the second gNA, wherein the second gNA has a targeting sequence complementary to a different or overlapping portion of the PCSK9 target nucleic acid compared to the first gNA, resulting in an additional break in the PCSK9 target nucleic acid of the cells of the population.

124. The method of any one of claims 120-123, wherein the modifying comprises introducing an insertion, deletion, substitution, duplication, or inversion of one or more nucleotides in the PCSK9 target nucleic acid of the cells of the population.

125. The method of any one of claims 120-124, wherein the PCSK9 target nucleic acid of at least about 1%, at least about 2%, at least about 3%, at least about 4%, at least about 5%, at least about 6%, at least about 7%, at least about 8%, at least about 9%, or at least about 10%, at least about 20%, at least about 30%, at least about 40%, at least about 50%, at least about 60% or more of the cells of the population is modified.

126. The method of any one of claims 120-124, wherein the modifying results in a knocking down or knocking out of the PCSK9 gene in the cells of the population such that expression of non-functional PCSK9 protein is decreased by at least about 10%, at least about 20%, at least about 30%, at least about 40%, at least about 50%, at least about 60%, at least about 70%, at least about 80%, or at least about 90% in comparison to a cell where the PCSK9 gene has not been modified.

127. The method of any one of claims 120-126, wherein the PCSK9 gene of the cells of the population is modified such that at least about 10%, at least about 20%, at least about 30%, at least about 40%, at least about 50%, at least about 60%, at least about 70%, at least about 80%, or at least about 90% of the modified cells do not express a detectable level of non-functional PCSK9 protein.

128. The method of any one of claims 120-124, wherein the modifying results in a correction or compensation of the mutation of the PCSK9 gene in the cells of the population such that functional PCSK9 protein is expressed by the cells.

129. The method of any one of claims 120-124 and 128, wherein expression of the functional PCSK9 protein by the cells of the population is increased by at least about 10%, at least about 20%, at least about 30%, at least about 40%, at least about 50%, at least about 60%, at least about 70%, at least about 80%, or at least about 90% in comparison to a cell where the PCSK9 gene has not been modified.

130. The method of any one of claims 120-123, wherein the method comprises insertion of a sequence of the donor template into the break site(s) of the PCSK9 gene target nucleic acid sequence of the cells of the population.

131. The method of claim 130, wherein the insertion of the sequence of the donor template is mediated by homology-directed repair (HDR) or homology-independent targeted integration (HITI).

132. The method of claim 130 or claim 131, wherein insertion of the sequence of the donor template results in a correction or compensation of the PCSK9 gene in the cells of the population such that functional PCSK9 protein is expressed by the cells.

133. The method of any one of claims 130-132, wherein expression of the functional PCSK9 protein by the cells of the population is increased by at least about 10%, at least about 20%, at least about 30%, at least about 40%, at least about 50%, at least about 60%, at least about 70%, at least about 80%, or at least about 90% in comparison to a cell where the PCSK9 gene has not been modified.

134. The method of any one of claims 130-132, wherein the PCSK9 gene of the cells of the population is modified such that at least about 50%, at least about 60%, at least about 70%, at least about 75%, at least about 80%, at least about 85%, at least about 90%, or at least about 95% of the modified cells express a detectable level of functional PCSK9.

135. The method of claim 130 or claim 131, wherein insertion of the sequence of the donor template results in a knocking down or knocking out the PCSK9 gene in the cells of the population such that expression of a non-functional PCSK9 protein is decreased by at least about 10%, at least about 20%, at least about 30%, at least about 40%, at least about 50%, at least about 60%, at least about 70%, at least about 80%, or at least about 90% in comparison to a cell where the PCSK9 gene has not been modified.

136. The method of claim 130 or claim 131, wherein the PCSK9 gene of the cells of the population is modified such that at least about 10%, at least about 20%, at least about 30%, at least about 40%, at least about 50%, at least about 60%, at least about 70%, at least about 80%, or at least about 90% of the modified cells do not express a detectable level of non-functional PCSK9 protein.

137. The method of any one of claims 120-136, wherein the cells are eukaryotic.

138. The method of claim 137, wherein the eukaryotic cells are selected from the group consisting of rodent cells, mouse cells, rat cells, and non-human primate cells.

139. The method of claim 137, wherein the eukaryotic cells are human cells.

140. The method of claim 137-139, wherein the eukaryotic cells are selected from the group consisting of a hepatocyte, a cell of the intestine, a cell of the kidney, a cell of the central nervous system, a smooth muscle cell, a macrophage, a cell of the retina, and an arterial endothelial cell.

141. The method of any one of claim 120-140, wherein the modifying of the PCSK9 gene target nucleic acid sequence of the population of cells occurs in vitro or ex vivo.

142. The method of claims 120-140, wherein the modifying of the PCSK9 gene target nucleic acid sequence of the population of cells occurs in vivo in a subject.

143. The method of claim 142, wherein the subject is selected from the group consisting of a rodent, a mouse, a rat, and a non-human primate.

144. The method of claim 142, wherein the subject is a human.

145. The method of any one of claims 142-144, wherein the method comprises administering a therapeutically effective dose of an AAV vector to the subject.

146. The method of claim 145, wherein the AAV vector is administered to the subject at a dose of at least about 1×10⁵ vector genomes/kg (vg/kg body weight), at least about 1×10⁶ vg/kg, at least about 1×10⁷ vg/kg, at least about 1×10⁸ vg/kg, at least about 1×10⁹ vg/kg, at least about 1×10¹⁰ vg/kg, at least about 1×10¹¹ vg/kg, at least about 1×10¹² vg/kg, at least about 1×10¹³ vg/kg, at least about 1×10¹⁴ vg/kg, at least about 1×10¹⁵ vg/kg, or at least about 1×10¹⁶ vg/kg.

147. The method of claim 145, wherein the AAV vector is administered to the subject at a dose of at least about 1×10⁵ vg/kg to about 1×10¹⁶ vg/kg, at least about 1×10⁶ vg/kg to about 1×10¹⁵ vg/kg, at least about 1×10⁷ vg/kg to about 1×10¹⁴ vg/kg, at least about 1×10⁸ vg/kg to about 1×10¹³ vg/kg, at least about 1×10⁹ vg/kg to about 1×10¹² vg/kg, or at least about 1×10¹⁰ vg/kg to about 1×10¹¹ vg/kg.

148. The method of any one of claims 142-144, wherein the method comprises administering a therapeutically effective dose of a VLP to the subject.

149. The method of claim 148, wherein the VLP is administered to the subject at a dose of at least about 1×10⁵ particles/kg body weight (particles/kg), at least about 1×10⁶ particles/kg, at least about 1×10⁷ particles/kg, at least about 1×10⁸ particles/kg, at least about 1×10⁹ particles/kg, at least about 1×10¹⁰ particles/kg, at least about 1×10¹¹ particles/kg, at least about 1×10¹² particles/kg, at least about 1×10¹³ particles/kg, at least about 1×10¹⁴ particles/kg, at least about 1×10¹⁵ particles/kg, at least about 1×10¹⁶ particles/kg.

150. The method of claim 148, wherein the VLP is administered to the subject at a dose of at least about 1×10⁵ particles/kg to about 1×10¹⁶ particles/kg, at least about 1×10⁶ particles/kg to about 1×10¹⁵ particles/kg, at least about 1×10⁷ particles/kg to about 1×10¹⁴ particles/kg, at least about 1×10⁸ particles/kg to about 1×10¹³ particles/kg, at least about 1×10⁹ particles/kg to about 1×10¹² particles/kg, at least about 1×10¹⁰ particles/kg to about 1×10¹¹ particles/kg.

151. The method of any one of claims 142-150, wherein the vector or VLP is administered to the subject by a route of administration selected from the group consisting of intravenous, intraportal vein injection, intraperitoneal, intramuscular, subcutaneous, intraocular, and oral routes.

152. The method of any one of claims 142-151, further comprising contacting the PCSK9 target nucleic acid sequence of the population of cells with:
a. an additional CRISPR nuclease and a gNA targeting a different or overlapping portion of the PCSK9 target nucleic acid compared to the first gNA;
b. one or more polynucleotides encoding the additional CRISPR nuclease and the gNA of (a);
c. a vector comprising the polynucleotide(s) of (b); or
d. a VLP comprising the additional CRISPR nuclease and the gNA of (a);
wherein the contacting results in modification of the PCSK9 gene at a different location in the sequence compared to the sequence targeted by the first gNA.

153. The method of claim 152, wherein the additional CRISPR nuclease is a CasX protein having a sequence different from the CasX protein of any of the preceding claims.

154. The method of claim 152, wherein the additional CRISPR nuclease is not a CasX protein.

155. The method of claim 154, wherein the additional CRISPR nuclease is selected from the group consisting of Cas9, Cas12a, Cas12b, Cas12c, Cas12d (CasY), Cas12J, Cas13a, Cas13b, Cas13c, Cas13d, CasX, CasY, CasZ, Cas14, Cpf1, C2c1, Csn2, Cas Phi, and sequence variants thereof.

156. A population of cells modified by the method of any one of claims 142-155, wherein the cells have been modified such that at least 70%, at least 75%, at least 80%, at least 85%, at least 90%, or at least 95% of the modified cells do not express a detectable level of non-functional PCSK9 protein.

157. A population of cells modified by the method of any one of claims 142-156, wherein the mutation of the PCSK9 target nucleic acid is corrected or compensated for in the modified cells of the population, resulting in expression of a functional PCSK9 protein by the modified cells.

158. The population of cells of claim 157, wherein the cells have been modified such that expression of a functional PCSK9 protein is increased by at least about 10%, at least about 20%, at least about 30%, at least about 40%, at least about 50%, at least about 60%, at least about 70%, at least about 80%, or at least about 90% in comparison to a cell where the PCSK9 gene has not been modified.

159. The population of cells of any one of claim 156-158, wherein the cells are selected from the group consisting of a hepatocyte, a cell of the intestine, a cell of the kidney, a cell of the central nervous system, a smooth muscle cell, a macrophage, a retinal cell, and an arterial endothelial cell.

160. A method of treating a PCSK9-related disease in a subject in need thereof, the method comprising administering to the subject a therapeutically effective amount of the cells of any one of claims 156-159.

161. The method of claim 160, wherein the PCSK9-related disease is autosomal dominant hypercholesterolemia (ADH), hypercholesterolemia, elevated total cholesterol levels, hyperlipidemia, elevated low-density lipoprotein (LDL) levels, elevated LDL-cholesterol levels, reduced high-density lipoprotein levels, liver steatosis, coronary heart disease, ischemia, stroke, peripheral vascular disease, thrombosis, type 2 diabetes, high elevated blood pressure, atherosclerosis, obesity, Alzheimer's disease, neurodegeneration, age-related macular degeneration (AMD), or a combination thereof.

162. The method of claim 160 or claim 161, wherein the subject is selected from the group consisting of a rodent, a mouse, a rat, and a non-human primate.

163. The method of any one of claims 160-162, wherein the subject is a human.

164. The method of any one of claims 160-163, wherein the cells are autologous with respect to the subject to be administered the cells.

165. The method of any one of claims 160-163 wherein the cells are allogeneic with respect to the subject to be administered the cells.

166. The method of any one of claims 160-165, wherein the cells are administered by a route of administration selected from the group consisting of intravenous, intraportal vein injection, intraperitoneal, intramuscular, subcutaneous, intraocular, and oral routes.

167. A method of treating a PCSK9-related disease in a subject in need thereof, comprising modifying a PCSK9 gene having one or more mutations in cells of the subject, the modifying comprising contacting said cells with a therapeutically effective dose of:
a. the system of any one of claims 1-96;
b. the nucleic acid of any one of claims 97-100;
c. the vector of any one of claims 101-107;
d. the VLP of any one of claims 108-113;
e. the pharmaceutical composition of any one of claims 116-119; or
f. combinations of two or more of (a)-(e),
wherein the PCSK9 gene of the cells targeted by the first gNA is modified by the CasX protein.

168. The method of claim 167, wherein the modifying comprises introducing a single-stranded break in the PCSK9 gene of the cells.

169. The method of claim 167, wherein the modifying comprises introducing a double-stranded break in the PCSK9 gene of the cells.

170. The method of any one of claims 167-169, further comprising introducing into the cells of the subject a second gNA or a nucleic acid encoding the second gNA, wherein the second gNA has a targeting sequence complementary to a different or overlapping portion of the target nucleic acid compared to the first gNA, resulting in an additional break in the PCSK9 target nucleic acid of the cells of the subject.

171. The method of any one of claims 167-169, wherein the modifying comprises introducing an insertion, deletion, substitution, duplication, or inversion of one or more nucleotides in the PCSK9 gene of the cells.

172. The method of any one of claims 167-170, wherein the modifying comprises insertion of a sequence of the donor template into the break site(s) of the PCSK9 gene target nucleic acid sequence of the cells.

173. The method of claim 172, wherein the insertion of the sequence of the donor template is mediated by homology-directed repair (HDR) or homology-independent targeted integration (HITI).

174. The method of any one of claims 167-173, wherein the modifying results in a correction of or compensation for the mutation(s) in the PCSK9 gene in the modified cells of the subject.

175. The method of claim 174, wherein correction of the mutation results in expression of functional PCSK9 protein by the modified cells of the subject.

176. The method of claim 174 or claim 175, wherein the PCSK9 gene of the modified cells express increased levels of a functional PCSK9 protein, and wherein the increase is at least about 10%, at least about 20%, at least about 30%, at least about 40%, at least about 50%, at least about 60%, at least about 70%, at least about 80%, or at least about 90% in comparison to a cell with a PCSK9 gene that has not been modified.

177. The method of any one of claims 167-173, wherein the modifying results in a knocking down or knocking out the PCSK9 gene in the modified cells of the subject such that at least about 10%, at least about 20%, at least about 30%, at least about 40%, at least about 50%, at least about 60%, at least about 70%, at least about 80%, or at least about 90% of the modified cells do not express a detectable level of non-functional PCSK9 protein.

178. The method of any one of claims 167-173, wherein the modifying results in a knocking down or knocking out the PCSK9 gene in the modified cells of the subject such that expression of non-functional PCSK9 protein in the subject is decreased by at least about 10%, at least about 20%, at least about 30%, at least about 40%, at least about 50%, at least about 60%, at least about 70%, at least about 80%, or at least about 90% in comparison to a subject where the PCSK9 gene has not been modified.

179. The method of any one of claims 167-178, wherein the subject is selected from the group consisting of rodent, mouse, rat, and non-human primate.

180. The method of any one of claims 167-178, wherein the subject is a human.

181. The method of any one of claims 167-180, wherein the cells that are modified are selected from the group consisting of a hepatocyte, a cell of the intestine, a cell of the kidney, a cell of the central nervous system, a smooth muscle cell, a macrophage, a cell of the retina, and an arterial endothelial cell.

182. The method of any one of claims 167-181, wherein the PCSK9-related disease is autosomal dominant hypercholesterolemia (ADH), hypercholesterolemia, elevated total cholesterol levels, hyperlipidemia, elevated low-density lipoprotein (LDL) levels, elevated LDL-cholesterol levels, reduced high-density lipoprotein levels, liver steatosis, coronary heart disease, ischemia, stroke, peripheral vascular disease, thrombosis, type 2 diabetes, high elevated blood pressure, atherosclerosis, obesity, Alzheimer's disease, neurodegeneration, age-related macular degeneration (AMD), or a combination thereof.

183. The method of any one of claims 167-182, wherein the vector is administered to the subject at a therapeutically-effective dose.

184. The method of any one of claims 167-183, wherein the vector is an AAV, and is administered to the subject at a dose of at least about 1×10⁵ vector genomes (vg)/kg, at least about 1×10⁶ vg/kg, at least about 1×10⁷ vg/kg, at least about 1×10⁸ vg/kg, at least about 1×10⁹ vg/kg, at least about 1×10¹⁰ vg/kg, at least about 1×10¹¹ vg/kg, at least about 1×10¹² vg/kg, at least about 1×10¹³ vg/kg, at least about 1×10¹⁴ vg/kg, at least about 1×10¹⁵ vg/kg, or at least about 1×10¹⁶ vg/kg.

185. The method of any one of claims 167-183, wherein the vector is an AAV, and is administered to the subject at a dose of at least about 1×10⁵ vg/kg to about 1×10¹⁶ vg/kg, at least about 1×10⁶ vg/kg to about 1×10¹⁵ vg/kg, at least about 1×10⁷ vg/kg to about 1×10¹⁴ vg/kg, at least about 1×10⁸ vg/kg to about 1×10¹³ vg/kg, at least about 1×10⁹ vg/kg to about 1×10¹² vg/kg, or at least about 1×10¹⁰ vg/kg to about 1×10¹¹ vg/kg.

186. The method of any one of claims 167-182, wherein the VLP is administered to the subject at a therapeutically-effective dose.

187. The method of claim 186, wherein the VLP is administered to the subject at a dose of at least about 1×10⁵ particles/kg, at least about 1×10⁶ particles/kg, at least about 1×10⁷ particles/kg, at least about 1×10⁸ particles/kg, at least about 1×10⁹ particles/kg, at least about 1×10¹⁰ particles/kg, at least about 1×10¹¹ particles/kg, at least about 1×10¹² particles/kg, at least about 1×10¹³ particles/kg, at least about 1×10¹⁴ particles/kg, at least about 1×10¹⁵ particles/kg, at least about 1×10¹⁶ particles/kg.

188. The method of claim 186, wherein the VLP is administered to the subject at a dose of at least about 1×10⁵ particles/kg to about 1×10¹⁶ particles/kg, at least about 1×10⁶ particles/kg to about 1×10¹⁵ particles/kg, at least about 1×10⁷ particles/kg to about 1×10¹⁴ particles/kg, at least about 1×10⁸ particles/kg to about 1×10¹³ particles/kg, at least about 1×10⁹ particles/kg to about 1×10¹² particles/kg, at least about 1×10¹⁰ particles/kg to about 1×10¹¹ particles/kg.

189. The method of any one of claims 183-188, wherein the vector or VLP is administered by a route of administration selected from the group consisting of intravenous, intraportal vein injection, intraperitoneal, intramuscular, subcutaneous, intraocular, and oral routes.

190. The method of any one of claims 167-189, wherein the method results in improvement in at least one clinically-relevant endpoint selected from the group consisting of change from baseline in LDL-cholesterol, decrease in plaque atheroma volume, reduction in in coronary plaque, reduction in atherosclerotic cardiovascular disease (ASCVD), cardiovascular death, nonfatal myocardial infarction, ischemic stroke, nonfatal stroke, coronary revascularization, unstable angina, or visual acuity.

191. The method of any one of claims 167-189, wherein the method results in improvement in at least two clinically-relevant endpoints selected from the group consisting of change from baseline in LDL-cholesterol, decrease in plaque atheroma volume, reduction in in coronary plaque, reduction in atherosclerotic cardiovascular disease (ASCVD), cardiovascular death, nonfatal myocardial infarction, ischemic stroke, nonfatal stroke, coronary revascularization, unstable angina or visual acuity.

192. The system of any one of claims 1-96; the nucleic acid of any one of claims 97-100; the vector of any one of claims 101-107; the VLP of any one of claims 108-113; the pharmaceutical composition of any one of claims 116-119; or combinations thereof, for use as a medicament for the treatment of a PCSK9-related disease.
